United States Patent Application Publication US 2010/0284995 A1 - sequence listing, part 2

SEQ ID NO: 3197 - protein, 450 aa, Artificial Sequence
  MMP-1 variant Q245R
FPATLETQEQDVDLVQKYLEKYYNLKNDGRQVEKRRNSGPVVEKLKQMQEFFGLKVTGKPDAETLKVMKQPRCGVPDVAQFVLTEGNPRWEQTHLTYRIENYTPDLPRADVDHAIEKAFQLWSNVTPLTFTKVSEGQADIMISFVRGDHRDNSPFDGPGGNLAHAFQPGPGIGGDAHFDEDERWTNNFREYNLHRVAAHELGHSLGLSHSTDIGALMYPSYTFSGDVQLAQDDIDGIQAIYGRSRNPVQPIGPQTPKACDSKLTFDAITTIRGEVMFFKDRFYMRTNPFYPEVELNFISVFWPQLPNGLEAAYEFADRDEVRFFKGNKYWAVQGQNVLHGYPKDIYSSFGFPRTVKHIDAALSEENTGKTYFFVANKYWRYDEYKRSMDPGYPKMIAHDFPGIGHKVDAVFMKDGFFYFFHGTRQYKFDPKTKRILTLQKANSWFNCRKN

SEQ ID NO: 3198 - protein, 450 aa, Artificial Sequence
  MMP-1 variant Q245C
FPATLETQEQDVDLVQKYLEKYYNLKNDGRQVEKRRNSGPVVEKLKQMQEFFGLKVTGKPDAETLKVMKQPRCGVPDVAQFVLTEGNPRWEQTHLTYRIENYTPDLPRADVDHAIEKAFQLWSNVTPLTFTKVSEGQADIMISFVRGDHRDNSPFDGPGGNLAHAFQPGPGIGGDAHFDEDERWTNNFREYNLHRVAAHELGHSLGLSHSTDIGALMYPSYTFSGDVQLAQDDIDGIQAIYGRSCNPVQPIGPQTPKACDSKLTFDAITTIRGEVMFFKDRFYMRTNPFYPEVELNFISVFWPQLPNGLEAAYEFADRDEVRFFKGNKYWAVQGQNVLHGYPKDIYSSFGFPRTVKHIDAALSEENTGKTYFFVANKYWRYDEYKRSMDPGYPKMIAHDFPGIGHKVDAVFMKDGFFYFFHGTRQYKFDPKTKRILTLQKANSWFNCRKN

SEQ ID NO: 3199 - protein, 450 aa, Artificial Sequence
  MMP-1 variant Q245N
FPATLETQEQDVDLVQKYLEKYYNLKNDGRQVEKRRNSGPVVEKLKQMQEFFGLKVTGKPDAETLKVMKQPRCGVPDVAQFVLTEGNPRWEQTHLTYRIENYTPDLPRADVDHAIEKAFQLWSNVTPLTFTKVSEGQADIMISFVRGDHRDNSPFDGPGGNLAHAFQPGPGIGGDAHFDEDERWTNNFREYNLHRVAAHELGHSLGLSHSTDIGALMYPSYTFSGDVQLAQDDIDGIQAIYGRSNNPVQPIGPQTPKACDSKLTFDAITTIRGEVMFFKDRFYMRTNPFYPEVELNFISVFWPQLPNGLEAAYEFADRDEVRFFKGNKYWAVQGQNVLHGYPKDIYSSFGFPRTVKHIDAALSEENTGKTYFFVANKYWRYDEYKRSMDPGYPKMIAHDFPGIGHKVDAVFMKDGFFYFFHGTRQYKFDPKTKRILTLQKANSWFNCRKN

SEQ ID NO: 3200 - protein, 450 aa, Artificial Sequence
  MMP-1 variant Q245T
FPATLETQEQDVDLVQKYLEKYYNLKNDGRQVEKRRNSGPVVEKLKQMQEFFGLKVTGKPDAETLKVMKQPRCGVPDVAQFVLTEGNPRWEQTHLTYRIENYTPDLPRADVDHAIEKAFQLWSNVTPLTFTKVSEGQADIMISFVRGDHRDNSPFDGPGGNLAHAFQPGPGIGGDAHFDEDERWTNNFREYNLHRVAAHELGHSLGLSHSTDIGALMYPSYTFSGDVQLAQDDIDGIQAIYGRSTNPVQPIGPQTPKACDSKLTFDAITTIRGEVMFFKDRFYMRTNPFYPEVELNFISVFWPQLPNGLEAAYEFADRDEVRFFKGNKYWAVQGQNVLHGYPKDIYSSFGFPRTVKHIDAALSEENTGKTYFFVANKYWRYDEYKRSMDPGYPKMIAHDFPGIGHKVDAVFMKDGFFYFFHGTRQYKFDPKTKRILTLQKANSWFNCRKN

SEQ ID NO: 3201 - protein, 450 aa, Artificial Sequence
  MMP-1 variant Q245Y
FPATLETQEQDVDLVQKYLEKYYNLKNDGRQVEKRRNSGPVVEKLKQMQEFFGLKVTGKPDAETLKVMKQPRCGVPDVAQFVLTEGNPRWEQTHLTYRIENYTPDLPRADVDHAIEKAFQLWSNVTPLTFTKVSEGQADIMISFVRGDHRDNSPFDGPGGNLAHAFQPGPGIGGDAHFDEDERWTNNFREYNLHRVAAHELGHSLGLSHSTDIGALMYPSYTFSGDVQLAQDDIDGIQAIYGRSYNPVQPIGPQTPKACDSKLTFDAITTIRGEVMFFKDRFYMRTNPFYPEVELNFISVFWPQLPNGLEAAYEFADRDEVRFFKGNKYWAVQGQNVLHGYPKDIYSSFGFPRTVKHIDAALSEENTGKTYFFVANKYWRYDEYKRSMDPGYPKMIAHDFPGIGHKVDAVFMKDGFFYFFHGTRQYKFDPKTKRILTLQKANSWFNCRKN

SEQ ID NO: 3202 - protein, 450 aa, Artificial Sequence
  MMP-1 variant Q245S
FPATLETQEQDVDLVQKYLEKYYNLKNDGRQVEKRRNSGPVVEKLKQMQEFFGLKVTGKPDAETLKVMKQPRCGVPDVAQFVLTEGNPRWEQTHLTYRIENYTPDLPRADVDHAIEKAFQLWSNVTPLTFTKVSEGQADIMISFVRGDHRDNSPFDGPGGNLAHAFQPGPGIGGDAHFDEDERWTNNFREYNLHRVAAHELGHSLGLSHSTDIGALMYPSYTFSGDVQLAQDDIDGIQAIYGRSSNPVQPIGPQTPKACDSKLTFDAITTIRGEVMFFKDRFYMRTNPFYPEVELNFISVFWPQLPNGLEAAYEFADRDEVRFFKGNKYWAVQGQNVLHGYPKDIYSSFGFPRTVKHIDAALSEENTGKTYFFVANKYWRYDEYKRSMDPGYPKMIAHDFPGIGHKVDAVFMKDGFFYFFHGTRQYKFDPKTKRILTLQKANSWFNCRKN

SEQ ID NO: 3203 - protein, 450 aa, Artificial Sequence
  MMP-1 variant Q245G
FPATLETQEQDVDLVQKYLEKYYNLKNDGRQVEKRRNSGPVVEKLKQMQEFFGLKVTGKPDAETLKVMKQPRCGVPDVAQFVLTEGNPRWEQTHLTYRIENYTPDLPRADVDHAIEKAFQLWSNVTPLTFTKVSEGQADIMISFVRGDHRDNSPFDGPGGNLAHAFQPGPGIGGDAHFDEDERWTNNFREYNLHRVAAHELGHSLGLSHSTDIGALMYPSYTFSGDVQLAQDDIDGIQAIYGRSGNPVQPIGPQTPKACDSKLTFDAITTIRGEVMFFKDRFYMRTNPFYPEVELNFISVFWPQLPNGLEAAYEFADRDEVRFFKGNKYWAVQGQNVLHGYPKDIYSSFGFPRTVKHIDAALSEENTGKTYFFVANKYWRYDEYKRSMDPGYPKMIAHDFPGIGHKVDAVFMKDGFFYFFHGTRQYKFDPKTKRILTLQKANSWFNCRKN

SEQ ID NO: 3204 - protein, 450 aa, Artificial Sequence
  MMP-1 variant Q245F
FPATLETQEQDVDLVQKYLEKYYNLKNDGRQVEKRRNSGPVVEKLKQMQEFFGLKVTGKPDAETLKVMKQPRCGVPDVAQFVLTEGNPRWEQTHLTYRIENYTPDLPRADVDHAIEKAFQLWSNVTPLTFTKVSEGQADIMISFVRGDHRDNSPFDGPGGNLAHAFQPGPGIGGDAHFDEDERWTNNFREYNLHRVAAHELGHSLGLSHSTDIGALMYPSYTFSGDVQLAQDDIDGIQAIYGRSFNPVQPIGPQTPKACDSKLTFDAITTIRGEVMFFKDRFYMRTNPFYPEVELNFISVFWPQLPNGLEAAYEFADRDEVRFFKGNKYWAVQGQNVLHGYPKDIYSSFGFPRTVKHIDAALSEENTGKTYFFVANKYWRYDEYKRSMDPGYPKMIAHDFPGIGHKVDAVFMKDGFFYFFHGTRQYKFDPKTKRILTLQKANSWFNCRKN

SEQ ID NO: 3205 - protein, 450 aa, Artificial Sequence
  MMP-1 variant Q245M
FPATLETQEQDVDLVQKYLEKYYNLKNDGRQVEKRRNSGPVVEKLKQMQEFFGLKVTGKPDAETLKVMKQPRCGVPDVAQFVLTEGNPRWEQTHLTYRIENYTPDLPRADVDHAIEKAFQLWSNVTPLTFTKVSEGQADIMISFVRGDHRDNSPFDGPGGNLAHAFQPGPGIGGDAHFDEDERWTNNFREYNLHRVAAHELGHSLGLSHSTDIGALMYPSYTFSGDVQLAQDDIDGIQAIYGRSMNPVQPIGPQTPKACDSKLTFDAITTIRGEVMFFKDRFYMRTNPFYPEVELNFISVFWPQLPNGLEAAYEFADRDEVRFFKGNKYWAVQGQNVLHGYPKDIYSSFGFPRTVKHIDAALSEENTGKTYFFVANKYWRYDEYKRSMDPGYPKMIAHDFPGIGHKVDAVFMKDGFFYFFHGTRQYKFDPKTKRILTLQKANSWFNCRKN

SEQ ID NO: 3206 - protein, 450 aa, Artificial Sequence
  MMP-1 variant Q245W
FPATLETQEQDVDLVQKYLEKYYNLKNDGRQVEKRRNSGPVVEKLKQMQEFFGLKVTGKPDAETLKVMKQPRCGVPDVAQFVLTEGNPRWEQTHLTYRIENYTPDLPRADVDHAIEKAFQLWSNVTPLTFTKVSEGQADIMISFVRGDHRDNSPFDGPGGNLAHAFQPGPGIGGDAHFDEDERWTNNFREYNLHRVAAHELGHSLGLSHSTDIGALMYPSYTFSGDVQLAQDDIDGIQAIYGRSWNPVQPIGPQTPKACDSKLTFDAITTIRGEVMFFKDRFYMRTNPFYPEVELNFISVFWPQLPNGLEAAYEFADRDEVRFFKGNKYWAVQGQNVLHGYPKDIYSSFGFPRTVKHIDAALSEENTGKTYFFVANKYWRYDEYKRSMDPGYPKMIAHDFPGIGHKVDAVFMKDGFFYFFHGTRQYKFDPKTKRILTLQKANSWFNCRKN

SEQ ID NO: 3207 - protein, 450 aa, Artificial Sequence
  MMP-1 variant Q245I
FPATLETQEQDVDLVQKYLEKYYNLKNDGRQVEKRRNSGPVVEKLKQMQEFFGLKVTGKPDAETLKVMKQPRCGVPDVAQFVLTEGNPRWEQTHLTYRIENYTPDLPRADVDHAIEKAFQLWSNVTPLTFTKVSEGQADIMISFVRGDHRDNSPFDGPGGNLAHAFQPGPGIGGDAHFDEDERWTNNFREYNLHRVAAHELGHSLGLSHSTDIGALMYPSYTFSGDVQLAQDDIDGIQAIYGRSINPVQPIGPQTPKACDSKLTFDAITTIRGEVMFFKDRFYMRTNPFYPEVELNFISVFWPQLPNGLEAAYEFADRDEVRFFKGNKYWAVQGQNVLHGYPKDIYSSFGFPRTVKHIDAALSEENTGKTYFFVANKYWRYDEYKRSMDPGYPKMIAHDFPGIGHKVDAVFMKDGFFYFFHGTRQYKFDPKTKRILTLQKANSWFNCRKN

SEQ ID NO: 3208 - protein, 450 aa, Artificial Sequence
  MMP-1 variant Q245V
FPATLETQEQDVDLVQKYLEKYYNLKNDGRQVEKRRNSGPVVEKLKQMQEFFGLKVTGKPDAETLKVMKQPRCGVPDVAQFVLTEGNPRWEQTHLTYRIENYTPDLPRADVDHAIEKAFQLWSNVTPLTFTKVSEGQADIMISFVRGDHRDNSPFDGPGGNLAHAFQPGPGIGGDAHFDEDERWTNNFREYNLHRVAAHELGHSLGLSHSTDIGALMYPSYTFSGDVQLAQDDIDGIQAIYGRSVNPVQPIGPQTPKACDSKLTFDAITTIRGEVMFFKDRFYMRTNPFYPEVELNFISVFWPQLPNGLEAAYEFADRDEVRFFKGNKYWAVQGQNVLHGYPKDIYSSFGFPRTVKHIDAALSEENTGKTYFFVANKYWRYDEYKRSMDPGYPKMIAHDFPGIGHKVDAVFMKDGFFYFFHGTRQYKFDPKTKRILTLQKANSWFNCRKN

SEQ ID NO: 3209 - protein, 450 aa, Artificial Sequence
  MMP-1 variant Q245L
FPATLETQEQDVDLVQKYLEKYYNLKNDGRQVEKRRNSGPVVEKLKQMQEFFGLKVTGKPDAETLKVMKQPRCGVPDVAQFVLTEGNPRWEQTHLTYRIENYTPDLPRADVDHAIEKAFQLWSNVTPLTFTKVSEGQADIMISFVRGDHRDNSPFDGPGGNLAHAFQPGPGIGGDAHFDEDERWTNNFREYNLHRVAAHELGHSLGLSHSTDIGALMYPSYTFSGDVQLAQDDIDGIQAIYGRSLNPVQPIGPQTPKACDSKLTFDAITTIRGEVMFFKDRFYMRTNPFYPEVELNFISVFWPQLPNGLEAAYEFADRDEVRFFKGNKYWAVQGQNVLHGYPKDIYSSFGFPRTVKHIDAALSEENTGKTYFFVANKYWRYDEYKRSMDPGYPKMIAHDFPGIGHKVDAVFMKDGFFYFFHGTRQYKFDPKTKRILTLQKANSWFNCRKN

SEQ ID NO: 3210 - protein, 450 aa, Artificial Sequence
  MMP-1 variant Q245A
FPATLETQEQDVDLVQKYLEKYYNLKNDGRQVEKRRNSGPVVEKLKQMQEFFGLKVTGKPDAETLKVMKQPRCGVPDVAQFVLTEGNPRWEQTHLTYRIENYTPDLPRADVDHAIEKAFQLWSNVTPLTFTKVSEGQADIMISFVRGDHRDNSPFDGPGGNLAHAFQPGPGIGGDAHFDEDERWTNNFREYNLHRVAAHELGHSLGLSHSTDIGALMYPSYTFSGDVQLAQDDIDGIQAIYGRSANPVQPIGPQTPKACDSKLTFDAITTIRGEVMFFKDRFYMRTNPFYPEVELNFISVFWPQLPNGLEAAYEFADRDEVRFFKGNKYWAVQGQNVLHGYPKDIYSSFGFPRTVKHIDAALSEENTGKTYFFVANKYWRYDEYKRSMDPGYPKMIAHDFPGIGHKVDAVFMKDGFFYFFHGTRQYKFDPKTKRILTLQKANSWFNCRKN

SEQ ID NO: 3211 - protein, 450 aa, Artificial Sequence
  MMP-1 variant Q245P
FPATLETQEQDVDLVQKYLEKYYNLKNDGRQVEKRRNSGPVVEKLKQMQEFFGLKVTGKPDAETLKVMKQPRCGVPDVAQFVLTEGNPRWEQTHLTYRIENYTPDLPRADVDHAIEKAFQLWSNVTPLTFTKVSEGQADIMISFVRGDHRDNSPFDGPGGNLAHAFQPGPGIGGDAHFDEDERWTNNFREYNLHRVAAHELGHSLGLSHSTDIGALMYPSYTFSGDVQLAQDDIDGIQAIYGRSPNPVQPIGPQTPKACDSKLTFDAITTIRGEVMFFKDRFYMRTNPFYPEVELNFISVFWPQLPNGLEAAYEFADRDEVRFFKGNKYWAVQGQNVLHGYPKDIYSSFGFPRTVKHIDAALSEENTGKTYFFVANKYWRYDEYKRSMDPGYPKMIAHDFPGIGHKVDAVFMKDGFFYFFHGTRQYKFDPKTKRILTLQKANSWFNCRKN

SEQ ID NO: 3212 - protein, 450 aa, Artificial Sequence
  MMP-1 variant N246D
FPATLETQEQDVDLVQKYLEKYYNLKNDGRQVEKRRNSGPVVEKLKQMQEFFGLKVTGKPDAETLKVMKQPRCGVPDVAQFVLTEGNPRWEQTHLTYRIENYTPDLPRADVDHAIEKAFQLWSNVTPLTFTKVSEGQADIMISFVRGDHRDNSPFDGPGGNLAHAFQPGPGIGGDAHFDEDERWTNNFREYNLHRVAAHELGHSLGLSHSTDIGALMYPSYTFSGDVQLAQDDIDGIQAIYGRSQDPVQPIGPQTPKACDSKLTFDAITTIRGEVMFFKDRFYMRTNPFYPEVELNFISVFWPQLPNGLEAAYEFADRDEVRFFKGNKYWAVQGQNVLHGYPKDIYSSFGFPRTVKHIDAALSEENTGKTYFFVANKYWRYDEYKRSMDPGYPKMIAHDFPGIGHKVDAVFMKDGFFYFFHGTRQYKFDPKTKRILTLQKANSWFNCRKN

SEQ ID NO: 3213 - protein, 450 aa, Artificial Sequence
  MMP-1 variant N246E
FPATLETQEQDVDLVQKYLEKYYNLKNDGRQVEKRRNSGPVVEKLKQMQEFFGLKVTGKPDAETLKVMKQPRCGVPDVAQFVLTEGNPRWEQTHLTYRIENYTPDLPRADVDHAIEKAFQLWSNVTPLTFTKVSEGQADIMISFVRGDHRDNSPFDGPGGNLAHAFQPGPGIGGDAHFDEDERWTNNFREYNLHRVAAHELGHSLGLSHSTDIGALMYPSYTFSGDVQLAQDDIDGIQAIYGRSQEPVQPIGPQTPKACDSKLTFDAITTIRGEVMFFKDRFYMRTNPFYPEVELNFISVFWPQLPNGLEAAYEFADRDEVRFFKGNKYWAVQGQNVLHGYPKDIYSSFGFPRTVKHIDAALSEENTGKTYFFVANKYWRYDEYKRSMDPGYPKMIAHDFPGIGHKVDAVFMKDGFFYFFHGTRQYKFDPKTKRILTLQKANSWFNCRKN

SEQ ID NO: 3214 - protein, 450 aa, Artificial Sequence
  MMP-1 variant N246H
FPATLETQEQDVDLVQKYLEKYYNLKNDGRQVEKRRNSGPVVEKLKQMQEFFGLKVTGKPDAETLKVMKQPRCGVPDVAQFVLTEGNPRWEQTHLTYRIENYTPDLPRADVDHAIEKAFQLWSNVTPLTFTKVSEGQADIMISFVRGDHRDNSPFDGPGGNLAHAFQPGPGIGGDAHFDEDERWTNNFREYNLHRVAAHELGHSLGLSHSTDIGALMYPSYTFSGDVQLAQDDIDGIQAIYGRSQHPVQPIGPQTPKACDSKLTFDAITTIRGEVMFFKDRFYMRTNPFYPEVELNFISVFWPQLPNGLEAAYEFADRDEVRFFKGNKYWAVQGQNVLHGYPKDIYSSFGFPRTVKHIDAALSEENTGKTYFFVANKYWRYDEYKRSMDPGYPKMIAHDFPGIGHKVDAVFMKDGFFYFFHGTRQYKFDPKTKRILTLQKANSWFNCRKN

SEQ ID NO: 3215 - protein, 450 aa, Artificial Sequence
  MMP-1 variant N246K
FPATLETQEQDVDLVQKYLEKYYNLKNDGRQVEKRRNSGPVVEKLKQMQEFFGLKVTGKPDAETLKVMKQPRCGVPDVAQFVLTEGNPRWEQTHLTYRIENYTPDLPRADVDHAIEKAFQLWSNVTPLTFTKVSEGQADIMISFVRGDHRDNSPFDGPGGNLAHAFQPGPGIGGDAHFDEDERWTNNFREYNLHRVAAHELGHSLGLSHSTDIGALMYPSYTFSGDVQLAQDDIDGIQAIYGRSQKPVQPIGPQTPKACDSKLTFDAITTIRGEVMFFKDRFYMRTNPFYPEVELNFISVFWPQLPNGLEAAYEFADRDEVRFFKGNKYWAVQGQNVLHGYPKDIYSSFGFPRTVKHIDAALSEENTGKTYFFVANKYWRYDEYKRSMDPGYPKMIAHDFPGIGHKVDAVFMKDGFFYFFHGTRQYKFDPKTKRILTLQKANSWFNCRKN

SEQ ID NO: 3216 - protein, 450 aa, Artificial Sequence
  MMP-1 variant N246R
FPATLETQEQDVDLVQKYLEKYYNLKNDGRQVEKRRNSGPVVEKLKQMQEFFGLKVTGKPDAETLKVMKQPRCGVPDVAQFVLTEGNPRWEQTHLTYRIENYTPDLPRADVDHAIEKAFQLWSNVTPLTFTKVSEGQADIMISFVRGDHRDNSPFDGPGGNLAHAFQPGPGIGGDAHFDEDERWTNNFREYNLHRVAAHELGHSLGLSHSTDIGALMYPSYTFSGDVQLAQDDIDGIQAIYGRSQRPVQPIGPQTPKACDSKLTFDAITTIRGEVMFFKDRFYMRTNPFYPEVELNFISVFWPQLPNGLEAAYEFADRDEVRFFKGNKYWAVQGQNVLHGYPKDIYSSFGFPRTVKHIDAALSEENTGKTYFFVANKYWRYDEYKRSMDPGYPKMIAHDFPGIGHKVDAVFMKDGFFYFFHGTRQYKFDPKTKRILTLQKANSWFNCRKN

SEQ ID NO: 3217 - protein, 450 aa, Artificial Sequence
  MMP-1 variant N246C
FPATLETQEQDVDLVQKYLEKYYNLKNDGRQVEKRRNSGPVVEKLKQMQEFFGLKVTGKPDAETLKVMKQPRCGVPDVAQFVLTEGNPRWEQTHLTYRIENYTPDLPRADVDHAIEKAFQLWSNVTPLTFTKVSEGQADIMISFVRGDHRDNSPFDGPGGNLAHAFQPGPGIGGDAHFDEDERWTNNFREYNLHRVAAHELGHSLGLSHSTDIGALMYPSYTFSGDVQLAQDDIDGIQAIYGRSQCPVQPIGPQTPKACDSKLTFDAITTIRGEVMFFKDRFYMRTNPFYPEVELNFISVFWPQLPNGLEAAYEFADRDEVRFFKGNKYWAVQGQNVLHGYPKDIYSSFGFPRTVKHIDAALSEENTGKTYFFVANKYWRYDEYKRSMDPGYPKMIAHDFPGIGHKVDAVFMKDGFFYFFHGTRQYKFDPKTKRILTLQKANSWFNCRKN

SEQ ID NO: 3218 - protein, 450 aa, Artificial Sequence
  MMP-1 variant N246Q
FPATLETQEQDVDLVQKYLEKYYNLKNDGRQVEKRRNSGPVVEKLKQMQEFFGLKVTGKPDAETLKVMKQPRCGVPDVAQFVLTEGNPRWEQTHLTYRIENYTPDLPRADVDHAIEKAFQLWSNVTPLTFTKVSEGQADIMISFVRGDHRDNSPFDGPGGNLAHAFQPGPGIGGDAHFDEDERWTNNFREYNLHRVAAHELGHSLGLSHSTDIGALMYPSYTFSGDVQLAQDDIDGIQAIYGRSQQPVQPIGPQTPKACDSKLTFDAITTIRGEVMFFKDRFYMRTNPFYPEVELNFISVFWPQLPNGLEAAYEFADRDEVRFFKGNKYWAVQGQNVLHGYPKDIYSSFGFPRTVKHIDAALSEENTGKTYFFVANKYWRYDEYKRSMDPGYPKMIAHDFPGIGHKVDAVFMKDGFFYFFHGTRQYKFDPKTKRILTLQKANSWFNCRKN

SEQ ID NO: 3219 - protein, 450 aa, Artificial Sequence
  MMP-1 variant N246T
FPATLETQEQDVDLVQKYLEKYYNLKNDGRQVEKRRNSGPVVEKLKQMQEFFGLKVTGKPDAETLKVMKQPRCGVPDVAQFVLTEGNPRWEQTHLTYRIENYTPDLPRADVDHAIEKAFQLWSNVTPLTFTKVSEGQADIMISFVRGDHRDNSPFDGPGGNLAHAFQPGPGIGGDAHFDEDERWTNNFREYNLHRVAAHELGHSLGLSHSTDIGALMYPSYTFSGDVQLAQDDIDGIQAIYGRSQTPVQPIGPQTPKACDSKLTFDAITTIRGEVMFFKDRFYMRTNPFYPEVELNFISVFWPQLPNGLEAAYEFADRDEVRFFKGNKYWAVQGQNVLHGYPKDIYSSFGFPRTVKHIDAALSEENTGKTYFFVANKYWRYDEYKRSMDPGYPKMIAHDFPGIGHKVDAVFMKDGFFYFFHGTRQYKFDPKTKRILTLQKANSWFNCRKN

SEQ ID NO: 3220 - protein, 450 aa, Artificial Sequence
  MMP-1 variant N246Y
FPATLETQEQDVDLVQKYLEKYYNLKNDGRQVEKRRNSGPVVEKLKQMQEFFGLKVTGKPDAETLKVMKQPRCGVPDVAQFVLTEGNPRWEQTHLTYRIENYTPDLPRADVDHAIEKAFQLWSNVTPLTFTKVSEGQADIMISFVRGDHRDNSPFDGPGGNLAHAFQPGPGIGGDAHFDEDERWTNNFREYNLHRVAAHELGHSLGLSHSTDIGALMYPSYTFSGDVQLAQDDIDGIQAIYGRSQYPVQPIGPQTPKACDSKLTFDAITTIRGEVMFFKDRFYMRTNPFYPEVELNFISVFWPQLPNGLEAAYEFADRDEVRFFKGNKYWAVQGQNVLHGYPKDIYSSFGFPRTVKHIDAALSEENTGKTYFFVANKYWRYDEYKRSMDPGYPKMIAHDFPGIGHKVDAVFMKDGFFYFFHGTRQYKFDPKTKRILTLQKANSWFNCRKN

SEQ ID NO: 3221 - protein, 450 aa, Artificial Sequence
  MMP-1 variant N246S
FPATLETQEQDVDLVQKYLEKYYNLKNDGRQVEKRRNSGPVVEKLKQMQEFFGLKVTGKPDAETLKVMKQPRCGVPDVAQFVLTEGNPRWEQTHLTYRIENYTPDLPRADVDHAIEKAFQLWSNVTPLTFTKVSEGQADIMISFVRGDHRDNSPFDGPGGNLAHAFQPGPGIGGDAHFDEDERWTNNFREYNLHRVAAHELGHSLGLSHSTDIGALMYPSYTFSGDVQLAQDDIDGIQAIYGRSQSPVQPIGPQTPKACDSKLTFDAITTIRGEVMFFKDRFYMRTNPFYPEVELNFISVFWPQLPNGLEAAYEFADRDEVRFFKGNKYWAVQGQNVLHGYPKDIYSSFGFPRTVKHIDAALSEENTGKTYFFVANKYWRYDEYKRSMDPGYPKMIAHDFPGIGHKVDAVFMKDGFFYFFHGTRQYKFDPKTKRILTLQKANSWFNCRKN

SEQ ID NO: 3222 - protein, 450 aa, Artificial Sequence
  MMP-1 variant N246G
FPATLETQEQDVDLVQKYLEKYYNLKNDGRQVEKRRNSGPVVEKLKQMQEFFGLKVTGKPDAETLKVMKQPRCGVPDVAQFVLTEGNPRWEQTHLTYRIENYTPDLPRADVDHAIEKAFQLWSNVTPLTFTKVSEGQADIMISFVRGDHRDNSPFDGPGGNLAHAFQPGPGIGGDAHFDEDERWTNNFREYNLHRVAAHELGHSLGLSHSTDIGALMYPSYTFSGDVQLAQDDIDGIQAIYGRSQGPVQPIGPQTPKACDSKLTFDAITTIRGEVMFFKDRFYMRTNPFYPEVELNFISVFWPQLPNGLEAAYEFADRDEVRFFKGNKYWAVQGQNVLHGYPKDIYSSFGFPRTVKHIDAALSEENTGKTYFFVANKYWRYDEYKRSMDPGYPKMIAHDFPGIGHKVDAVFMKDGFFYFFHGTRQYKFDPKTKRILTLQKANSWFNCRKN

SEQ ID NO: 3223 - protein, 450 aa, Artificial Sequence
  MMP-1 variant N246F
FPATLETQEQDVDLVQKYLEKYYNLKNDGRQVEKRRNSGPVVEKLKQMQEFFGLKVTGKPDAETLKVMKQPRCGVPDVAQFVLTEGNPRWEQTHLTYRIENYTPDLPRADVDHAIEKAFQLWSNVTPLTFTKVSEGQADIMISFVRGDHRDNSPFDGPGGNLAHAFQPGPGIGGDAHFDEDERWTNNFREYNLHRVAAHELGHSLGLSHSTDIGALMYPSYTFSGDVQLAQDDIDGIQAIYGRSQFPVQPIGPQTPKACDSKLTFDAITTIRGEVMFFKDRFYMRTNPFYPEVELNFISVFWPQLPNGLEAAYEFADRDEVRFFKGNKYWAVQGQNVLHGYPKDIYSSFGFPRTVKHIDAALSEENTGKTYFFVANKYWRYDEYKRSMDPGYPKMIAHDFPGIGHKVDAVFMKDGFFYFFHGTRQYKFDPKTKRILTLQKANSWFNCRKN

SEQ ID NO: 3224 - protein, 450 aa, Artificial Sequence
  MMP-1 variant N246M
FPATLETQEQDVDLVQKYLEKYYNLKNDGRQVEKRRNSGPVVEKLKQMQEFFGLKVTGKPDAETLKVMKQPRCGVPDVAQFVLTEGNPRWEQTHLTYRIENYTPDLPRADVDHAIEKAFQLWSNVTPLTFTKVSEGQADIMISFVRGDHRDNSPFDGPGGNLAHAFQPGPGIGGDAHFDEDERWTNNFREYNLHRVAAHELGHSLGLSHSTDIGALMYPSYTFSGDVQLAQDDIDGIQAIYGRSQMPVQPIGPQTPKACDSKLTFDAITTIRGEVMFFKDRFYMRTNPFYPEVELNFISVFWPQLPNGLEAAYEFADRDEVRFFKGNKYWAVQGQNVLHGYPKDIYSSFGFPRTVKHIDAALSEENTGKTYFFVANKYWRYDEYKRSMDPGYPKMIAHDFPGIGHKVDAVFMKDGFFYFFHGTRQYKFDPKTKRILTLQKANSWFNCRKN

SEQ ID NO: 3225 - protein, 450 aa, Artificial Sequence
  MMP-1 variant N246W
FPATLETQEQDVDLVQKYLEKYYNLKNDGRQVEKRRNSGPVVEKLKQMQEFFGLKVTGKPDAETLKVMKQPRCGVPDVAQFVLTEGNPRWEQTHLTYRIENYTPDLPRADVDHAIEKAFQLWSNVTPLTFTKVSEGQADIMISFVRGDHRDNSPFDGPGGNLAHAFQPGPGIGGDAHFDEDERWTNNFREYNLHRVAAHELGHSLGLSHSTDIGALMYPSYTFSGDVQLAQDDIDGIQAIYGRSQWPVQPIGPQTPKACDSKLTFDAITTIRGEVMFFKDRFYMRTNPFYPEVELNFISVFWPQLPNGLEAAYEFADRDEVRFFKGNKYWAVQGQNVLHGYPKDIYSSFGFPRTVKHIDAALSEENTGKTYFFVANKYWRYDEYKRSMDPGYPKMIAHDFPGIGHKVDAVFMKDGFFYFFHGTRQYKFDPKTKRILTLQKANSWFNCRKN

SEQ ID NO: 3226 - protein, 450 aa, Artificial Sequence
  MMP-1 variant N246I
FPATLETQEQDVDLVQKYLEKYYNLKNDGRQVEKRRNSGPVVEKLKQMQEFFGLKVTGKPDAETLKVMKQPRCGVPDVAQFVLTEGNPRWEQTHLTYRIENYTPDLPRADVDHAIEKAFQLWSNVTPLTFTKVSEGQADIMISFVRGDHRDNSPFDGPGGNLAHAFQPGPGIGGDAHFDEDERWTNNFREYNLHRVAAHELGHSLGLSHSTDIGALMYPSYTFSGDVQLAQDDIDGIQAIYGRSQIPVQPIGPQTPKACDSKLTFDAITTIRGEVMFFKDRFYMRTNPFYPEVELNFISVFWPQLPNGLEAAYEFADRDEVRFFKGNKYWAVQGQNVLHGYPKDIYSSFGFPRTVKHIDAALSEENTGKTYFFVANKYWRYDEYKRSMDPGYPKMIAHDFPGIGHKVDAVFMKDGFFYFFHGTRQYKFDPKTKRILTLQKANSWFNCRKN

SEQ ID NO: 3227 - protein, 450 aa, Artificial Sequence
  MMP-1 variant N246V
FPATLETQEQDVDLVQKYLEKYYNLKNDGRQVEKRRNSGPVVEKLKQMQEFFGLKVTGKPDAETLKVMKQPRCGVPDVAQFVLTEGNPRWEQTHLTYRIENYTPDLPRADVDHAIEKAFQLWSNVTPLTFTKVSEGQADIMISFVRGDHRDNSPFDGPGGNLAHAFQPGPGIGGDAHFDEDERWTNNFREYNLHRVAAHELGHSLGLSHSTDIGALMYPSYTFSGDVQLAQDDIDGIQAIYGRSQVPVQPIGPQTPKACDSKLTFDAITTIRGEVMFFKDRFYMRTNPFYPEVELNFISVFWPQLPNGLEAAYEFADRDEVRFFKGNKYWAVQGQNVLHGYPKDIYSSFGFPRTVKHIDAALSEENTGKTYFFVANKYWRYDEYKRSMDPGYPKMIAHDFPGIGHKVDAVFMKDGFFYFFHGTRQYKFDPKTKRILTLQKANSWFNCRKN

SEQ ID NO: 3228 - protein, 450 aa, Artificial Sequence
  MMP-1 variant N246L
FPATLETQEQDVDLVQKYLEKYYNLKNDGRQVEKRRNSGPVVEKLKQMQEFFGLKVTGKPDAETLKVMKQPRCGVPDVAQFVLTEGNPRWEQTHLTYRIENYTPDLPRADVDHAIEKAFQLWSNVTPLTFTKVSEGQADIMISFVRGDHRDNSPFDGPGGNLAHAFQPGPGIGGDAHFDEDERWTNNFREYNLHRVAAHELGHSLGLSHSTDIGALMYPSYTFSGDVQLAQDDIDGIQAIYGRSQLPVQPIGPQTPKACDSKLTFDAITTIRGEVMFFKDRFYMRTNPFYPEVELNFISVFWPQLPNGLEAAYEFADRDEVRFFKGNKYWAVQGQNVLHGYPKDIYSSFGFPRTVKHIDAALSEENTGKTYFFVANKYWRYDEYKRSMDPGYPKMIAHDFPGIGHKVDAVFMKDGFFYFFHGTRQYKFDPKTKRILTLQKANSWFNCRKN

SEQ ID NO: 3229 - protein, 450 aa, Artificial Sequence
  MMP-1 variant N246A
FPATLETQEQDVDLVQKYLEKYYNLKNDGRQVEKRRNSGPVVEKLKQMQEFFGLKVTGKPDAETLKVMKQPRCGVPDVAQFVLTEGNPRWEQTHLTYRIENYTPDLPRADVDHAIEKAFQLWSNVTPLTFTKVSEGQADIMISFVRGDHRDNSPFDGPGGNLAHAFQPGPGIGGDAHFDEDERWTNNFREYNLHRVAAHELGHSLGLSHSTDIGALMYPSYTFSGDVQLAQDDIDGIQAIYGRSQAPVQPIGPQTPKACDSKLTFDAITTIRGEVMFFKDRFYMRTNPFYPEVELNFISVFWPQLPNGLEAAYEFADRDEVRFFKGNKYWAVQGQNVLHGYPKDIYSSFGFPRTVKHIDAALSEENTGKTYFFVANKYWRYDEYKRSMDPGYPKMIAHDFPGIGHKVDAVFMKDGFFYFFHGTRQYKFDPKTKRILTLQKANSWFNCRKN

SEQ ID NO: 3230 - protein, 450 aa, Artificial Sequence
  MMP-1 variant N246P
FPATLETQEQDVDLVQKYLEKYYNLKNDGRQVEKRRNSGPVVEKLKQMQEFFGLKVTGKPDAETLKVMKQPRCGVPDVAQFVLTEGNPRWEQTHLTYRIENYTPDLPRADVDHAIEKAFQLWSNVTPLTFTKVSEGQADIMISFVRGDHRDNSPFDGPGGNLAHAFQPGPGIGGDAHFDEDERWTNNFREYNLHRVAAHELGHSLGLSHSTDIGALMYPSYTFSGDVQLAQDDIDGIQAIYGRSQPPVQPIGPQTPKACDSKLTFDAITTIRGEVMFFKDRFYMRTNPFYPEVELNFISVFWPQLPNGLEAAYEFADRDEVRFFKGNKYWAVQGQNVLHGYPKDIYSSFGFPRTVKHIDAALSEENTGKTYFFVANKYWRYDEYKRSMDPGYPKMIAHDFPGIGHKVDAVFMKDGFFYFFHGTRQYKFDPKTKRILTLQKANSWFNCRKN

SEQ ID NO: 3231 - protein, 450 aa, Artificial Sequence
  MMP-1 variant P247D
FPATLETQEQDVDLVQKYLEKYYNLKNDGRQVEKRRNSGPVVEKLKQMQEFFGLKVTGKPDAETLKVMKQPRCGVPDVAQFVLTEGNPRWEQTHLTYRIENYTPDLPRADVDHAIEKAFQLWSNVTPLTFTKVSEGQADIMISFVRGDHRDNSPFDGPGGNLAHAFQPGPGIGGDAHFDEDERWTNNFREYNLHRVAAHELGHSLGLSHSTDIGALMYPSYTFSGDVQLAQDDIDGIQAIYGRSQNDVQPIGPQTPKACDSKLTFDAITTIRGEVMFFKDRFYMRTNPFYPEVELNFISVFWPQLPNGLEAAYEFADRDEVRFFKGNKYWAVQGQNVLHGYPKDIYSSFGFPRTVKHIDAALSEENTGKTYFFVANKYWRYDEYKRSMDPGYPKMIAHDFPGIGHKVDAVFMKDGFFYFFHGTRQYKFDPKTKRILTLQKANSWFNCRKN

SEQ ID NO: 3232 - protein, 450 aa, Artificial Sequence
  MMP-1 variant P247E
FPATLETQEQDVDLVQKYLEKYYNLKNDGRQVEKRRNSGPVVEKLKQMQEFFGLKVTGKPDAETLKVMKQPRCGVPDVAQFVLTEGNPRWEQTHLTYRIENYTPDLPRADVDHAIEKAFQLWSNVTPLTFTKVSEGQADIMISFVRGDHRDNSPFDGPGGNLAHAFQPGPGIGGDAHFDEDERWTNNFREYNLHRVAAHELGHSLGLSHSTDIGALMYPSYTFSGDVQLAQDDIDGIQAIYGRSQNEVQPIGPQTPKACDSKLTFDAITTIRGEVMFFKDRFYMRTNPFYPEVELNFISVFWPQLPNGLEAAYEFADRDEVRFFKGNKYWAVQGQNVLHGYPKDIYSSFGFPRTVKHIDAALSEENTGKTYFFVANKYWRYDEYKRSMDPGYPKMIAHDFPGIGHKVDAVFMKDGFFYFFHGTRQYKFDPKTKRILTLQKANSWFNCRKN

SEQ ID NO: 3233 - protein, 450 aa, Artificial Sequence
  MMP-1 variant P247H
FPATLETQEQDVDLVQKYLEKYYNLKNDGRQVEKRRNSGPVVEKLKQMQEFFGLKVTGKPDAETLKVMKQPRCGVPDVAQFVLTEGNPRWEQTHLTYRIENYTPDLPRADVDHAIEKAFQLWSNVTPLTFTKVSEGQADIMISFVRGDHRDNSPFDGPGGNLAHAFQPGPGIGGDAHFDEDERWTNNFREYNLHRVAAHELGHSLGLSHSTDIGALMYPSYTFSGDVQLAQDDIDGIQAIYGRSQNHVQPIGPQTPKACDSKLTFDAITTIRGEVMFFKDRFYMRTNPFYPEVELNFISVFWPQLPNGLEAAYEFADRDEVRFFKGNKYWAVQGQNVLHGYPKDIYSSFGFPRTVKHIDAALSEENTGKTYFFVANKYWRYDEYKRSMDPGYPKMIAHDFPGIGHKVDAVFMKDGFFYFFHGTRQYKFDPKTKRILTLQKANSWFNCRKN

SEQ ID NO: 3234 - protein, 450 aa, Artificial Sequence
  MMP-1 variant P247K
FPATLETQEQDVDLVQKYLEKYYNLKNDGRQVEKRRNSGPVVEKLKQMQEFFGLKVTGKPDAETLKVMKQPRCGVPDVAQFVLTEGNPRWEQTHLTYRIENYTPDLPRADVDHAIEKAFQLWSNVTPLTFTKVSEGQADIMISFVRGDHRDNSPFDGPGGNLAHAFQPGPGIGGDAHFDEDERWTNNFREYNLHRVAAHELGHSLGLSHSTDIGALMYPSYTFSGDVQLAQDDIDGIQAIYGRSQNKVQPIGPQTPKACDSKLTFDAITTIRGEVMFFKDRFYMRTNPFYPEVELNFISVFWPQLPNGLEAAYEFADRDEVRFFKGNKYWAVQGQNVLHGYPKDIYSSFGFPRTVKHIDAALSEENTGKTYFFVANKYWRYDEYKRSMDPGYPKMIAHDFPGIGHKVDAVFMKDGFFYFFHGTRQYKFDPKTKRILTLQKANSWFNCRKN

SEQ ID NO: 3235 - protein, 450 aa, Artificial Sequence
  MMP-1 variant P247R
FPATLETQEQDVDLVQKYLEKYYNLKNDGRQVEKRRNSGPVVEKLKQMQEFFGLKVTGKPDAETLKVMKQPRCGVPDVAQFVLTEGNPRWEQTHLTYRIENYTPDLPRADVDHAIEKAFQLWSNVTPLTFTKVSEGQADIMISFVRGDHRDNSPFDGPGGNLAHAFQPGPGIGGDAHFDEDERWTNNFREYNLHRVAAHELGHSLGLSHSTDIGALMYPSYTFSGDVQLAQDDIDGIQAIYGRSQNRVQPIGPQTPKACDSKLTFDAITTIRGEVMFFKDRFYMRTNPFYPEVELNFISVFWPQLPNGLEAAYEFADRDEVRFFKGNKYWAVQGQNVLHGYPKDIYSSFGFPRTVKHIDAALSEENTGKTYFFVANKYWRYDEYKRSMDPGYPKMIAHDFPGIGHKVDAVFMKDGFFYFFHGTRQYKFDPKTKRILTLQKANSWFNCRKN

SEQ ID NO: 3236 - protein, 450 aa, Artificial Sequence
  MMP-1 variant P247C
FPATLETQEQDVDLVQKYLEKYYNLKNDGRQVEKRRNSGPVVEKLKQMQEFFGLKVTGKPDAETLKVMKQPRCGVPDVAQFVLTEGNPRWEQTHLTYRIENYTPDLPRADVDHAIEKAFQLWSNVTPLTFTKVSEGQADIMISFVRGDHRDNSPFDGPGGNLAHAFQPGPGIGGDAHFDEDERWTNNFREYNLHRVAAHELGHSLGLSHSTDIGALMYPSYTFSGDVQLAQDDIDGIQAIYGRSQNCVQPIGPQTPKACDSKLTFDAITTIRGEVMFFKDRFYMRTNPFYPEVELNFISVFWPQLPNGLEAAYEFADRDEVRFFKGNKYWAVQGQNVLHGYPKDIYSSFGFPRTVKHIDAALSEENTGKTYFFVANKYWRYDEYKRSMDPGYPKMIAHDFPGIGHKVDAVFMKDGFFYFFHGTRQYKFDPKTKRILTLQKANSWFNCRKN

SEQ ID NO: 3237 - protein, 450 aa, Artificial Sequence
  MMP-1 variant P247N
FPATLETQEQDVDLVQKYLEKYYNLKNDGRQVEKRRNSGPVVEKLKQMQEFFGLKVTGKPDAETLKVMKQPRCGVPDVAQFVLTEGNPRWEQTHLTYRIENYTPDLPRADVDHAIEKAFQLWSNVTPLTFTKVSEGQADIMISFVRGDHRDNSPFDGPGGNLAHAFQPGPGIGGDAHFDEDERWTNNFREYNLHRVAAHELGHSLGLSHSTDIGALMYPSYTFSGDVQLAQDDIDGIQAIYGRSQNNVQPIGPQTPKACDSKLTFDAITTIRGEVMFFKDRFYMRTNPFYPEVELNFISVFWPQLPNGLEAAYEFADRDEVRFFKGNKYWAVQGQNVLHGYPKDIYSSFGFPRTVKHIDAALSEENTGKTYFFVANKYWRYDEYKRSMDPGYPKMIAHDFPGIGHKVDAVFMKDGFFYFFHGTRQYKFDPKTKRILTLQKANSWFNCRKN

SEQ ID NO: 3238 - protein, 450 aa, Artificial Sequence
  MMP-1 variant P247Q
FPATLETQEQDVDLVQKYLEKYYNLKNDGRQVEKRRNSGPVVEKLKQMQEFFGLKVTGKPDAETLKVMKQPRCGVPDVAQFVLTEGNPRWEQTHLTYRIENYTPDLPRADVDHAIEKAFQLWSNVTPLTFTKVSEGQADIMISFVRGDHRDNSPFDGPGGNLAHAFQPGPGIGGDAHFDEDERWTNNFREYNLHRVAAHELGHSLGLSHSTDIGALMYPSYTFSGDVQLAQDDIDGIQAIYGRSQNQVQPIGPQTPKACDSKLTFDAITTIRGEVMFFKDRFYMRTNPFYPEVELNFISVFWPQLPNGLEAAYEFADRDEVRFFKGNKYWAVQGQNVLHGYPKDIYSSFGFPRTVKHIDAALSEENTGKTYFFVANKYWRYDEYKRSMDPGYPKMIAHDFPGIGHKVDAVFMKDGFFYFFHGTRQYKFDPKTKRILTLQKANSWFNCRKN

SEQ ID NO: 3239 - protein, 450 aa, Artificial Sequence
  MMP-1 variant P247T
FPATLETQEQDVDLVQKYLEKYYNLKNDGRQVEKRRNSGPVVEKLKQMQEFFGLKVTGKPDAETLKVMKQPRCGVPDVAQFVLTEGNPRWEQTHLTYRIENYTPDLPRADVDHAIEKAFQLWSNVTPLTFTKVSEGQADIMISFVRGDHRDNSPFDGPGGNLAHAFQPGPGIGGDAHFDEDERWTNNFREYNLHRVAAHELGHSLGLSHSTDIGALMYPSYTFSGDVQLAQDDIDGIQAIYGRSQNTVQPIGPQTPKACDSKLTFDAITTIRGEVMFFKDRFYMRTNPFYPEVELNFISVFWPQLPNGLEAAYEFADRDEVRFFKGNKYWAVQGQNVLHGYPKDIYSSFGFPRTVKHIDAALSEENTGKTYFFVANKYWRYDEYKRSMDPGYPKMIAHDFPGIGHKVDAVFMKDGFFYFFHGTRQYKFDPKTKRILTLQKANSWFNCRKN

SEQ ID NO: 3240 - protein, 450 aa, Artificial Sequence
  MMP-1 variant P247Y
FPATLETQEQDVDLVQKYLEKYYNLKNDGRQVEKRRNSGPVVEKLKQMQEFFGLKVTGKPDAETLKVMKQPRCGVPDVAQFVLTEGNPRWEQTHLTYRIENYTPDLPRADVDHAIEKAFQLWSNVTPLTFTKVSEGQADIMISFVRGDHRDNSPFDGPGGNLAHAFQPGPGIGGDAHFDEDERWTNNFREYNLHRVAAHELGHSLGLSHSTDIGALMYPSYTFSGDVQLAQDDIDGIQAIYGRSQNYVQPIGPQTPKACDSKLTFDAITTIRGEVMFFKDRFYMRTNPFYPEVELNFISVFWPQLPNGLEAAYEFADRDEVRFFKGNKYWAVQGQNVLHGYPKDIYSSFGFPRTVKHIDAALSEENTGKTYFFVANKYWRYDEYKRSMDPGYPKMIAHDFPGIGHKVDAVFMKDGFFYFFHGTRQYKFDPKTKRILTLQKANSWFNCRKN

SEQ ID NO: 3241 - protein, 450 aa, Artificial Sequence
  MMP-1 variant P247S
FPATLETQEQDVDLVQKYLEKYYNLKNDGRQVEKRRNSGPVVEKLKQMQEFFGLKVTGKPDAETLKVMKQPRCGVPDVAQFVLTEGNPRWEQTHLTYRIENYTPDLPRADVDHAIEKAFQLWSNVTPLTFTKVSEGQADIMISFVRGDHRDNSPFDGPGGNLAHAFQPGPGIGGDAHFDEDERWTNNFREYNLHRVAAHELGHSLGLSHSTDIGALMYPSYTFSGDVQLAQDDIDGIQAIYGRSQNSVQPIGPQTPKACDSKLTFDAITTIRGEVMFFKDRFYMRTNPFYPEVELNFISVFWPQLPNGLEAAYEFADRDEVRFFKGNKYWAVQGQNVLHGYPKDIYSSFGFPRTVKHIDAALSEENTGKTYFFVANKYWRYDEYKRSMDPGYPKMIAHDFPGIGHKVDAVFMKDGFFYFFHGTRQYKFDPKTKRILTLQKANSWFNCRKN

SEQ ID NO: 3242 - protein, 450 aa, Artificial Sequence
  MMP-1 variant P247G
FPATLETQEQDVDLVQKYLEKYYNLKNDGRQVEKRRNSGPVVEKLKQMQEFFGLKVTGKPDAETLKVMKQPRCGVPDVAQFVLTEGNPRWEQTHLTYRIENYTPDLPRADVDHAIEKAFQLWSNVTPLTFTKVSEGQADIMISFVRGDHRDNSPFDGPGGNLAHAFQPGPGIGGDAHFDEDERWTNNFREYNLHRVAAHELGHSLGLSHSTDIGALMYPSYTFSGDVQLAQDDIDGIQAIYGRSQNGVQPIGPQTPKACDSKLTFDAITTIRGEVMFFKDRFYMRTNPFYPEVELNFISVFWPQLPNGLEAAYEFADRDEVRFFKGNKYWAVQGQNVLHGYPKDIYSSFGFPRTVKHIDAALSEENTGKTYFFVANKYWRYDEYKRSMDPGYPKMIAHDFPGIGHKVDAVFMKDGFFYFFHGTRQYKFDPKTKRILTLQKANSWFNCRKN

SEQ ID NO: 3243 - protein, 450 aa, Artificial Sequence
  MMP-1 variant P247F
FPATLETQEQDVDLVQKYLEKYYNLKNDGRQVEKRRNSGPVVEKLKQMQEFFGLKVTGKPDAETLKVMKQPRCGVPDVAQFVLTEGNPRWEQTHLTYRIENYTPDLPRADVDHAIEKAFQLWSNVTPLTFTKVSEGQADIMISFVRGDHRDNSPFDGPGGNLAHAFQPGPGIGGDAHFDEDERWTNNFREYNLHRVAAHELGHSLGLSHSTDIGALMYPSYTFSGDVQLAQDDIDGIQAIYGRSQNFVQPIGPQTPKACDSKLTFDAITTIRGEVMFFKDRFYMRTNPFYPEVELNFISVFWPQLPNGLEAAYEFADRDEVRFFKGNKYWAVQGQNVLHGYPKDIYSSFGFPRTVKHIDAALSEENTGKTYFFVANKYWRYDEYKRSMDPGYPKMIAHDFPGIGHKVDAVFMKDGFFYFFHGTRQYKFDPKTKRILTLQKANSWFNCRKN

SEQ ID NO: 3244 - protein, 450 aa, Artificial Sequence
  MMP-1 variant P247M
FPATLETQEQDVDLVQKYLEKYYNLKNDGRQVEKRRNSGPVVEKLKQMQEFFGLKVTGKPDAETLKVMKQPRCGVPDVAQFVLTEGNPRWEQTHLTYRIENYTPDLPRADVDHAIEKAFQLWSNVTPLTFTKVSEGQADIMISFVRGDHRDNSPFDGPGGNLAHAFQPGPGIGGDAHFDEDERWTNNFREYNLHRVAAHELGHSLGLSHSTDIGALMYPSYTFSGDVQLAQDDIDGIQAIYGRSQNMVQPIGPQTPKACDSKLTFDAITTIRGEVMFFKDRFYMRTNPFYPEVELNFISVFWPQLPNGLEAAYEFADRDEVRFFKGNKYWAVQGQNVLHGYPKDIYSSFGFPRTVKHIDAALSEENTGKTYFFVANKYWRYDEYKRSMDPGYPKMIAHDFPGIGHKVDAVFMKDGFFYFFHGTRQYKFDPKTKRILTLQKANSWFNCRKN

SEQ ID NO: 3245 - protein, 450 aa, Artificial Sequence
  MMP-1 variant P247W
FPATLETQEQDVDLVQKYLEKYYNLKNDGRQVEKRRNSGPVVEKLKQMQEFFGLKVTGKPDAETLKVMKQPRCGVPDVAQFVLTEGNPRWEQTHLTYRIENYTPDLPRADVDHAIEKAFQLWSNVTPLTFTKVSEGQADIMISFVRGDHRDNSPFDGPGGNLAHAFQPGPGIGGDAHFDEDERWTNNFREYNLHRVAAHELGHSLGLSHSTDIGALMYPSYTFSGDVQLAQDDIDGIQAIYGRSQNWVQPIGPQTPKACDSKLTFDAITTIRGEVMFFKDRFYMRTNPFYPEVELNFISVFWPQLPNGLEAAYEFADRDEVRFFKGNKYWAVQGQNVLHGYPKDIYSSFGFPRTVKHIDAALSEENTGKTYFFVANKYWRYDEYKRSMDPGYPKMIAHDFPGIGHKVDAVFMKDGFFYFFHGTRQYKFDPKTKRILTLQKANSWFNCRKN

SEQ ID NO: 3246 - protein, 450 aa, Artificial Sequence
  MMP-1 variant P247I
FPATLETQEQDVDLVQKYLEKYYNLKNDGRQVEKRRNSGPVVEKLKQMQEFFGLKVTGKPDAETLKVMKQPRCGVPDVAQFVLTEGNPRWEQTHLTYRIENYTPDLPRADVDHAIEKAFQLWSNVTPLTFTKVSEGQADIMISFVRGDHRDNSPFDGPGGNLAHAFQPGPGIGGDAHFDEDERWTNNFREYNLHRVAAHELGHSLGLSHSTDIGALMYPSYTFSGDVQLAQDDIDGIQAIYGRSQNIVQPIGPQTPKACDSKLTFDAITTIRGEVMFFKDRFYMRTNPFYPEVELNFISVFWPQLPNGLEAAYEFADRDEVRFFKGNKYWAVQGQNVLHGYPKDIYSSFGFPRTVKHIDAALSEENTGKTYFFVANKYWRYDEYKRSMDPGYPKMIAHDFPGIGHKVDAVFMKDGFFYFFHGTRQYKFDPKTKRILTLQKANSWFNCRKN

SEQ ID NO: 3247 - protein, 450 aa, Artificial Sequence
  MMP-1 variant P247V
FPATLETQEQDVDLVQKYLEKYYNLKNDGRQVEKRRNSGPVVEKLKQMQEFFGLKVTGKPDAETLKVMKQPRCGVPDVAQFVLTEGNPRWEQTHLTYRIENYTPDLPRADVDHAIEKAFQLWSNVTPLTFTKVSEGQADIMISFVRGDHRDNSPFDGPGGNLAHAFQPGPGIGGDAHFDEDERWTNNFREYNLHRVAAHELGHSLGLSHSTDIGALMYPSYTFSGDVQLAQDDIDGIQAIYGRSQNVVQPIGPQTPKACDSKLTFDAITTIRGEVMFFKDRFYMRTNPFYPEVELNFISVFWPQLPNGLEAAYEFADRDEVRFFKGNKYWAVQGQNVLHGYPKDIYSSFGFPRTVKHIDAALSEENTGKTYFFVANKYWRYDEYKRSMDPGYPKMIAHDFPGIGHKVDAVFMKDGFFYFFHGTRQYKFDPKTKRILTLQKANSWFNCRKN

SEQ ID NO: 3248 - protein, 450 aa, Artificial Sequence
  MMP-1 variant P247L
FPATLETQEQDVDLVQKYLEKYYNLKNDGRQVEKRRNSGPVVEKLKQMQEFFGLKVTGKPDAETLKVMKQPRCGVPDVAQFVLTEGNPRWEQTHLTYRIENYTPDLPRADVDHAIEKAFQLWSNVTPLTFTKVSEGQADIMISFVRGDHRDNSPFDGPGGNLAHAFQPGPGIGGDAHFDEDERWTNNFREYNLHRVAAHELGHSLGLSHSTDIGALMYPSYTFSGDVQLAQDDIDGIQAIYGRSQNLVQPIGPQTPKACDSKLTFDAITTIRGEVMFFKDRFYMRTNPFYPEVELNFISVFWPQLPNGLEAAYEFADRDEVRFFKGNKYWAVQGQNVLHGYPKDIYSSFGFPRTVKHIDAALSEENTGKTYFFVANKYWRYDEYKRSMDPGYPKMIAHDFPGIGHKVDAVFMKDGFFYFFHGTRQYKFDPKTKRILTLQKANSWFNCRKN

SEQ ID NO: 3249 - protein, 450 aa, Artificial Sequence
  MMP-1 variant P247A
FPATLETQEQDVDLVQKYLEKYYNLKNDGRQVEKRRNSGPVVEKLKQMQEFFGLKVTGKPDAETLKVMKQPRCGVPDVAQFVLTEGNPRWEQTHLTYRIENYTPDLPRADVDHAIEKAFQLWSNVTPLTFTKVSEGQADIMISFVRGDHRDNSPFDGPGGNLAHAFQPGPGIGGDAHFDEDERWTNNFREYNLHRVAAHELGHSLGLSHSTDIGALMYPSYTFSGDVQLAQDDIDGIQAIYGRSQNAVQPIGPQTPKACDSKLTFDAITTIRGEVMFFKDRFYMRTNPFYPEVELNFISVFWPQLPNGLEAAYEFADRDEVRFFKGNKYWAVQGQNVLHGYPKDIYSSFGFPRTVKHIDAALSEENTGKTYFFVANKYWRYDEYKRSMDPGYPKMIAHDFPGIGHKVDAVFMKDGFFYFFHGTRQYKFDPKTKRILTLQKANSWFNCRKN

SEQ ID NO: 3250 - protein, 450 aa, Artificial Sequence
  MMP-1 variant V248D
FPATLETQEQDVDLVQKYLEKYYNLKNDGRQVEKRRNSGPVVEKLKQMQEFFGLKVTGKPDAETLKVMKQPRCGVPDVAQFVLTEGNPRWEQTHLTYRIENYTPDLPRADVDHAIEKAFQLWSNVTPLTFTKVSEGQADIMISFVRGDHRDNSPFDGPGGNLAHAFQPGPGIGGDAHFDEDERWTNNFREYNLHRVAAHELGHSLGLSHSTDIGALMYPSYTFSGDVQLAQDDIDGIQAIYGRSQNPDQPIGPQTPKACDSKLTFDAITTIRGEVMFFKDRFYMRTNPFYPEVELNFISVFWPQLPNGLEAAYEFADRDEVRFFKGNKYWAVQGQNVLHGYPKDIYSSFGFPRTVKHIDAALSEENTGKTYFFVANKYWRYDEYKRSMDPGYPKMIAHDFPGIGHKVDAVFMKDGFFYFFHGTRQYKFDPKTKRILTLQKANSWFNCRKN

SEQ ID NO: 3251 - protein, 450 aa, Artificial Sequence
  MMP-1 variant V248E
FPATLETQEQDVDLVQKYLEKYYNLKNDGRQVEKRRNSGPVVEKLKQMQEFFGLKVTGKPDAETLKVMKQPRCGVPDVAQFVLTEGNPRWEQTHLTYRIENYTPDLPRADVDHAIEKAFQLWSNVTPLTFTKVSEGQADIMISFVRGDHRDNSPFDGPGGNLAHAFQPGPGIGGDAHFDEDERWTNNFREYNLHRVAAHELGHSLGLSHSTDIGALMYPSYTFSGDVQLAQDDIDGIQAIYGRSQNPEQPIGPQTPKACDSKLTFDAITTIRGEVMFFKDRFYMRTNPFYPEVELNFISVFWPQLPNGLEAAYEFADRDEVRFFKGNKYWAVQGQNVLHGYPKDIYSSFGFPRTVKHIDAALSEENTGKTYFFVANKYWRYDEYKRSMDPGYPKMIAHDFPGIGHKVDAVFMKDGFFYFFHGTRQYKFDPKTKRILTLQKANSWFNCRKN

SEQ ID NO: 3252 - protein, 450 aa, Artificial Sequence
  MMP-1 variant V248H
FPATLETQEQDVDLVQKYLEKYYNLKNDGRQVEKRRNSGPVVEKLKQMQEFFGLKVTGKPDAETLKVMKQPRCGVPDVAQFVLTEGNPRWEQTHLTYRIENYTPDLPRADVDHAIEKAFQLWSNVTPLTFTKVSEGQADIMISFVRGDHRDNSPFDGPGGNLAHAFQPGPGIGGDAHFDEDERWTNNFREYNLHRVAAHELGHSLGLSHSTDIGALMYPSYTFSGDVQLAQDDIDGIQAIYGRSQNPHQPIGPQTPKACDSKLTFDAITTIRGEVMFFKDRFYMRTNPFYPEVELNFISVFWPQLPNGLEAAYEFADRDEVRFFKGNKYWAVQGQNVLHGYPKDIYSSFGFPRTVKHIDAALSEENTGKTYFFVANKYWRYDEYKRSMDPGYPKMIAHDFPGIGHKVDAVFMKDGFFYFFHGTRQYKFDPKTKRILTLQKANSWFNCRKN

SEQ ID NO: 3253 - protein, 450 aa, Artificial Sequence
  MMP-1 variant V248K
FPATLETQEQDVDLVQKYLEKYYNLKNDGRQVEKRRNSGPVVEKLKQMQEFFGLKVTGKPDAETLKVMKQPRCGVPDVAQFVLTEGNPRWEQTHLTYRIENYTPDLPRADVDHAIEKAFQLWSNVTPLTFTKVSEGQADIMISFVRGDHRDNSPFDGPGGNLAHAFQPGPGIGGDAHFDEDERWTNNFREYNLHRVAAHELGHSLGLSHSTDIGALMYPSYTFSGDVQLAQDDIDGIQAIYGRSQNPKQPIGPQTPKACDSKLTFDAITTIRGEVMFFKDRFYMRTNPFYPEVELNFISVFWPQLPNGLEAAYEFADRDEVRFFKGNKYWAVQGQNVLHGYPKDIYSSFGFPRTVKHIDAALSEENTGKTYFFVANKYWRYDEYKRSMDPGYPKMIAHDFPGIGHKVDAVFMKDGFFYFFHGTRQYKFDPKTKRILTLQKANSWFNCRKN

SEQ ID NO: 3254 - protein, 450 aa, Artificial Sequence
  MMP-1 variant V248R
FPATLETQEQDVDLVQKYLEKYYNLKNDGRQVEKRRNSGPVVEKLKQMQEFFGLKVTGKPDAETLKVMKQPRCGVPDVAQFVLTEGNPRWEQTHLTYRIENYTPDLPRADVDHAIEKAFQLWSNVTPLTFTKVSEGQADIMISFVRGDHRDNSPFDGPGGNLAHAFQPGPGIGGDAHFDEDERWTNNFREYNLHRVAAHELGHSLGLSHSTDIGALMYPSYTFSGDVQLAQDDIDGIQAIYGRSQNPRQPIGPQTPKACDSKLTFDAITTIRGEVMFFKDRFYMRTNPFYPEVELNFISVFWPQLPNGLEAAYEFADRDEVRFFKGNKYWAVQGQNVLHGYPKDIYSSFGFPRTVKHIDAALSEENTGKTYFFVANKYWRYDEYKRSMDPGYPKMIAHDFPGIGHKVDAVFMKDGFFYFFHGTRQYKFDPKTKRILTLQKANSWFNCRKN

SEQ ID NO: 3255 - protein, 450 aa, Artificial Sequence
  MMP-1 variant V248C
FPATLETQEQDVDLVQKYLEKYYNLKNDGRQVEKRRNSGPVVEKLKQMQEFFGLKVTGKPDAETLKVMKQPRCGVPDVAQFVLTEGNPRWEQTHLTYRIENYTPDLPRADVDHAIEKAFQLWSNVTPLTFTKVSEGQADIMISFVRGDHRDNSPFDGPGGNLAHAFQPGPGIGGDAHFDEDERWTNNFREYNLHRVAAHELGHSLGLSHSTDIGALMYPSYTFSGDVQLAQDDIDGIQAIYGRSQNPCQPIGPQTPKACDSKLTFDAITTIRGEVMFFKDRFYMRTNPFYPEVELNFISVFWPQLPNGLEAAYEFADRDEVRFFKGNKYWAVQGQNVLHGYPKDIYSSFGFPRTVKHIDAALSEENTGKTYFFVANKYWRYDEYKRSMDPGYPKMIAHDFPGIGHKVDAVFMKDGFFYFFHGTRQYKFDPKTKRILTLQKANSWFNCRKN

SEQ ID NO: 3256 - protein, 450 aa, Artificial Sequence
  MMP-1 variant V248N
FPATLETQEQDVDLVQKYLEKYYNLKNDGRQVEKRRNSGPVVEKLKQMQEFFGLKVTGKPDAETLKVMKQPRCGVPDVAQFVLTEGNPRWEQTHLTYRIENYTPDLPRADVDHAIEKAFQLWSNVTPLTFTKVSEGQADIMISFVRGDHRDNSPFDGPGGNLAHAFQPGPGIGGDAHFDEDERWTNNFREYNLHRVAAHELGHSLGLSHSTDIGALMYPSYTFSGDVQLAQDDIDGIQAIYGRSQNPNQPIGPQTPKACDSKLTFDAITTIRGEVMFFKDRFYMRTNPFYPEVELNFISVFWPQLPNGLEAAYEFADRDEVRFFKGNKYWAVQGQNVLHGYPKDIYSSFGFPRTVKHIDAALSEENTGKTYFFVANKYWRYDEYKRSMDPGYPKMIAHDFPGIGHKVDAVFMKDGFFYFFHGTRQYKFDPKTKRILTLQKANSWFNCRKN

SEQ ID NO: 3257 - protein, 450 aa, Artificial Sequence
  MMP-1 variant V248Q
FPATLETQEQDVDLVQKYLEKYYNLKNDGRQVEKRRNSGPVVEKLKQMQEFFGLKVTGKPDAETLKVMKQPRCGVPDVAQFVLTEGNPRWEQTHLTYRIENYTPDLPRADVDHAIEKAFQLWSNVTPLTFTKVSEGQADIMISFVRGDHRDNSPFDGPGGNLAHAFQPGPGIGGDAHFDEDERWTNNFREYNLHRVAAHELGHSLGLSHSTDIGALMYPSYTFSGDVQLAQDDIDGIQAIYGRSQNPQQPIGPQTPKACDSKLTFDAITTIRGEVMFFKDRFYMRTNPFYPEVELNFISVFWPQLPNGLEAAYEFADRDEVRFFKGNKYWAVQGQNVLHGYPKDIYSSFGFPRTVKHIDAALSEENTGKTYFFVANKYWRYDEYKRSMDPGYPKMIAHDFPGIGHKVDAVFMKDGFFYFFHGTRQYKFDPKTKRILTLQKANSWFNCRKN

SEQ ID NO: 3258 - protein, 450 aa, Artificial Sequence
  MMP-1 variant V248T
FPATLETQEQDVDLVQKYLEKYYNLKNDGRQVEKRRNSGPVVEKLKQMQEFFGLKVTGKPDAETLKVMKQPRCGVPDVAQFVLTEGNPRWEQTHLTYRIENYTPDLPRADVDHAIEKAFQLWSNVTPLTFTKVSEGQADIMISFVRGDHRDNSPFDGPGGNLAHAFQPGPGIGGDAHFDEDERWTNNFREYNLHRVAAHELGHSLGLSHSTDIGALMYPSYTFSGDVQLAQDDIDGIQAIYGRSQNPTQPIGPQTPKACDSKLTFDAITTIRGEVMFFKDRFYMRTNPFYPEVELNFISVFWPQLPNGLEAAYEFADRDEVRFFKGNKYWAVQGQNVLHGYPKDIYSSFGFPRTVKHIDAALSEENTGKTYFFVANKYWRYDEYKRSMDPGYPKMIAHDFPGIGHKVDAVFMKDGFFYFFHGTRQYKFDPKTKRILTLQKANSWFNCRKN

SEQ ID NO: 3259 - protein, 450 aa, Artificial Sequence
  MMP-1 variant V248Y
FPATLETQEQDVDLVQKYLEKYYNLKNDGRQVEKRRNSGPVVEKLKQMQEFFGLKVTGKPDAETLKVMKQPRCGVPDVAQFVLTEGNPRWEQTHLTYRIENYTPDLPRADVDHAIEKAFQLWSNVTPLTFTKVSEGQADIMISFVRGDHRDNSPFDGPGGNLAHAFQPGPGIGGDAHFDEDERWTNNFREYNLHRVAAHELGHSLGLSHSTDIGALMYPSYTFSGDVQLAQDDIDGIQAIYGRSQNPYQPIGPQTPKACDSKLTFDAITTIRGEVMFFKDRFYMRTNPFYPEVELNFISVFWPQLPNGLEAAYEFADRDEVRFFKGNKYWAVQGQNVLHGYPKDIYSSFGFPRTVKHIDAALSEENTGKTYFFVANKYWRYDEYKRSMDPGYPKMIAHDFPGIGHKVDAVFMKDGFFYFFHGTRQYKFDPKTKRILTLQKANSWFNCRKN

SEQ ID NO: 3260 - protein, 450 aa, Artificial Sequence
  MMP-1 variant V248S
FPATLETQEQDVDLVQKYLEKYYNLKNDGRQVEKRRNSGPVVEKLKQMQEFFGLKVTGKPDAETLKVMKQPRCGVPDVAQFVLTEGNPRWEQTHLTYRIENYTPDLPRADVDHAIEKAFQLWSNVTPLTFTKVSEGQADIMISFVRGDHRDNSPFDGPGGNLAHAFQPGPGIGGDAHFDEDERWTNNFREYNLHRVAAHELGHSLGLSHSTDIGALMYPSYTFSGDVQLAQDDIDGIQAIYGRSQNPSQPIGPQTPKACDSKLTFDAITTIRGEVMFFKDRFYMRTNPFYPEVELNFISVFWPQLPNGLEAAYEFADRDEVRFFKGNKYWAVQGQNVLHGYPKDIYSSFGFPRTVKHIDAALSEENTGKTYFFVANKYWRYDEYKRSMDPGYPKMIAHDFPGIGHKVDAVFMKDGFFYFFHGTRQYKFDPKTKRILTLQKANSWFNCRKN

SEQ ID NO: 3261 - protein, 450 aa, Artificial Sequence
  MMP-1 variant V248G
FPATLETQEQDVDLVQKYLEKYYNLKNDGRQVEKRRNSGPVVEKLKQMQEFFGLKVTGKPDAETLKVMKQPRCGVPDVAQFVLTEGNPRWEQTHLTYRIENYTPDLPRADVDHAIEKAFQLWSNVTPLTFTKVSEGQADIMISFVRGDHRDNSPFDGPGGNLAHAFQPGPGIGGDAHFDEDERWTNNFREYNLHRVAAHELGHSLGLSHSTDIGALMYPSYTFSGDVQLAQDDIDGIQAIYGRSQNPGQPIGPQTPKACDSKLTFDAITTIRGEVMFFKDRFYMRTNPFYPEVELNFISVFWPQLPNGLEAAYEFADRDEVRFFKGNKYWAVQGQNVLHGYPKDIYSSFGFPRTVKHIDAALSEENTGKTYFFVANKYWRYDEYKRSMDPGYPKMIAHDFPGIGHKVDAVFMKDGFFYFFHGTRQYKFDPKTKRILTLQKANSWFNCRKN

SEQ ID NO: 3262 - protein, 450 aa, Artificial Sequence
  MMP-1 variant V248F
FPATLETQEQDVDLVQKYLEKYYNLKNDGRQVEKRRNSGPVVEKLKQMQEFFGLKVTGKPDAETLKVMKQPRCGVPDVAQFVLTEGNPRWEQTHLTYRIENYTPDLPRADVDHAIEKAFQLWSNVTPLTFTKVSEGQADIMISFVRGDHRDNSPFDGPGGNLAHAFQPGPGIGGDAHFDEDERWTNNFREYNLHRVAAHELGHSLGLSHSTDIGALMYPSYTFSGDVQLAQDDIDGIQAIYGRSQNPFQPIGPQTPKACDSKLTFDAITTIRGEVMFFKDRFYMRTNPFYPEVELNFISVFWPQLPNGLEAAYEFADRDEVRFFKGNKYWAVQGQNVLHGYPKDIYSSFGFPRTVKHIDAALSEENTGKTYFFVANKYWRYDEYKRSMDPGYPKMIAHDFPGIGHKVDAVFMKDGFFYFFHGTRQYKFDPKTKRILTLQKANSWFNCRKN

SEQ ID NO: 3263 - protein, 450 aa, Artificial Sequence
  MMP-1 variant V248M
FPATLETQEQDVDLVQKYLEKYYNLKNDGRQVEKRRNSGPVVEKLKQMQEFFGLKVTGKPDAETLKVMKQPRCGVPDVAQFVLTEGNPRWEQTHLTYRIENYTPDLPRADVDHAIEKAFQLWSNVTPLTFTKVSEGQADIMISFVRGDHRDNSPFDGPGGNLAHAFQPGPGIGGDAHFDEDERWTNNFREYNLHRVAAHELGHSLGLSHSTDIGALMYPSYTFSGDVQLAQDDIDGIQAIYGRSQNPMQPIGPQTPKACDSKLTFDAITTIRGEVMFFKDRFYMRTNPFYPEVELNFISVFWPQLPNGLEAAYEFADRDEVRFFKGNKYWAVQGQNVLHGYPKDIYSSFGFPRTVKHIDAALSEENTGKTYFFVANKYWRYDEYKRSMDPGYPKMIAHDFPGIGHKVDAVFMKDGFFYFFHGTRQYKFDPKTKRILTLQKANSWFNCRKN

SEQ ID NO: 3264 - protein, 450 aa, Artificial Sequence
  MMP-1 variant V248W
FPATLETQEQDVDLVQKYLEKYYNLKNDGRQVEKRRNSGPVVEKLKQMQEFFGLKVTGKPDAETLKVMKQPRCGVPDVAQFVLTEGNPRWEQTHLTYRIENYTPDLPRADVDHAIEKAFQLWSNVTPLTFTKVSEGQADIMISFVRGDHRDNSPFDGPGGNLAHAFQPGPGIGGDAHFDEDERWTNNFREYNLHRVAAHELGHSLGLSHSTDIGALMYPSYTFSGDVQLAQDDIDGIQAIYGRSQNPWQPIGPQTPKACDSKLTFDAITTIRGEVMFFKDRFYMRTNPFYPEVELNFISVFWPQLPNGLEAAYEFADRDEVRFFKGNKYWAVQGQNVLHGYPKDIYSSFGFPRTVKHIDAALSEENTGKTYFFVANKYWRYDEYKRSMDPGYPKMIAHDFPGIGHKVDAVFMKDGFFYFFHGTRQYKFDPKTKRILTLQKANSWFNCRKN

SEQ ID NO: 3265 - protein, 450 aa, Artificial Sequence
  MMP-1 variant V248I
FPATLETQEQDVDLVQKYLEKYYNLKNDGRQVEKRRNSGPVVEKLKQMQEFFGLKVTGKPDAETLKVMKQPRCGVPDVAQFVLTEGNPRWEQTHLTYRIENYTPDLPRADVDHAIEKAFQLWSNVTPLTFTKVSEGQADIMISFVRGDHRDNSPFDGPGGNLAHAFQPGPGIGGDAHFDEDERWTNNFREYNLHRVAAHELGHSLGLSHSTDIGALMYPSYTFSGDVQLAQDDIDGIQAIYGRSQNPIQPIGPQTPKACDSKLTFDAITTIRGEVMFFKDRFYMRTNPFYPEVELNFISVFWPQLPNGLEAAYEFADRDEVRFFKGNKYWAVQGQNVLHGYPKDIYSSFGFPRTVKHIDAALSEENTGKTYFFVANKYWRYDEYKRSMDPGYPKMIAHDFPGIGHKVDAVFMKDGFFYFFHGTRQYKFDPKTKRILTLQKANSWFNCRKN

SEQ ID NO: 3266 - protein, 450 aa, Artificial Sequence
  MMP-1 variant V248L
FPATLETQEQDVDLVQKYLEKYYNLKNDGRQVEKRRNSGPVVEKLKQMQEFFGLKVTGKPDAETLKVMKQPRCGVPDVAQFVLTEGNPRWEQTHLTYRIENYTPDLPRADVDHAIEKAFQLWSNVTPLTFTKVSEGQADIMISFVRGDHRDNSPFDGPGGNLAHAFQPGPGIGGDAHFDEDERWTNNFREYNLHRVAAHELGHSLGLSHSTDIGALMYPSYTFSGDVQLAQDDIDGIQAIYGRSQNPLQPIGPQTPKACDSKLTFDAITTIRGEVMFFKDRFYMRTNPFYPEVELNFISVFWPQLPNGLEAAYEFADRDEVRFFKGNKYWAVQGQNVLHGYPKDIYSSFGFPRTVKHIDAALSEENTGKTYFFVANKYWRYDEYKRSMDPGYPKMIAHDFPGIGHKVDAVFMKDGFFYFFHGTRQYKFDPKTKRILTLQKANSWFNCRKN

SEQ ID NO: 3267 - protein, 450 aa, Artificial Sequence
  MMP-1 variant V248A
FPATLETQEQDVDLVQKYLEKYYNLKNDGRQVEKRRNSGPVVEKLKQMQEFFGLKVTGKPDAETLKVMKQPRCGVPDVAQFVLTEGNPRWEQTHLTYRIENYTPDLPRADVDHAIEKAFQLWSNVTPLTFTKVSEGQADIMISFVRGDHRDNSPFDGPGGNLAHAFQPGPGIGGDAHFDEDERWTNNFREYNLHRVAAHELGHSLGLSHSTDIGALMYPSYTFSGDVQLAQDDIDGIQAIYGRSQNPAQPIGPQTPKACDSKLTFDAITTIRGEVMFFKDRFYMRTNPFYPEVELNFISVFWPQLPNGLEAAYEFADRDEVRFFKGNKYWAVQGQNVLHGYPKDIYSSFGFPRTVKHIDAALSEENTGKTYFFVANKYWRYDEYKRSMDPGYPKMIAHDFPGIGHKVDAVFMKDGFFYFFHGTRQYKFDPKTKRILTLQKANSWFNCRKN

SEQ ID NO: 3268 - protein, 450 aa, Artificial Sequence
  MMP-1 variant V248P
FPATLETQEQDVDLVQKYLEKYYNLKNDGRQVEKRRNSGPVVEKLKQMQEFFGLKVTGKPDAETLKVMKQPRCGVPDVAQFVLTEGNPRWEQTHLTYRIENYTPDLPRADVDHAIEKAFQLWSNVTPLTFTKVSEGQADIMISFVRGDHRDNSPFDGPGGNLAHAFQPGPGIGGDAHFDEDERWTNNFREYNLHRVAAHELGHSLGLSHSTDIGALMYPSYTFSGDVQLAQDDIDGIQAIYGRSQNPPQPIGPQTPKACDSKLTFDAITTIRGEVMFFKDRFYMRTNPFYPEVELNFISVFWPQLPNGLEAAYEFADRDEVRFFKGNKYWAVQGQNVLHGYPKDIYSSFGFPRTVKHIDAALSEENTGKTYFFVANKYWRYDEYKRSMDPGYPKMIAHDFPGIGHKVDAVFMKDGFFYFFHGTRQYKFDPKTKRILTLQKANSWFNCRKN

SEQ ID NO: 3269 - protein, 450 aa, Artificial Sequence
  MMP-1 variant Q249D
FPATLETQEQDVDLVQKYLEKYYNLKNDGRQVEKRRNSGPVVEKLKQMQEFFGLKVTGKPDAETLKVMKQPRCGVPDVAQFVLTEGNPRWEQTHLTYRIENYTPDLPRADVDHAIEKAFQLWSNVTPLTFTKVSEGQADIMISFVRGDHRDNSPFDGPGGNLAHAFQPGPGIGGDAHFDEDERWTNNFREYNLHRVAAHELGHSLGLSHSTDIGALMYPSYTFSGDVQLAQDDIDGIQAIYGRSQNPVDPIGPQTPKACDSKLTFDAITTIRGEVMFFKDRFYMRTNPFYPEVELNFISVFWPQLPNGLEAAYEFADRDEVRFFKGNKYWAVQGQNVLHGYPKDIYSSFGFPRTVKHIDAALSEENTGKTYFFVANKYWRYDEYKRSMDPGYPKMIAHDFPGIGHKVDAVFMKDGFFYFFHGTRQYKFDPKTKRILTLQKANSWFNCRKN

SEQ ID NO: 3270 - protein, 450 aa, Artificial Sequence
  MMP-1 variant Q249E
FPATLETQEQDVDLVQKYLEKYYNLKNDGRQVEKRRNSGPVVEKLKQMQEFFGLKVTGKPDAETLKVMKQPRCGVPDVAQFVLTEGNPRWEQTHLTYRIENYTPDLPRADVDHAIEKAFQLWSNVTPLTFTKVSEGQADIMISFVRGDHRDNSPFDGPGGNLAHAFQPGPGIGGDAHFDEDERWTNNFREYNLHRVAAHELGHSLGLSHSTDIGALMYPSYTFSGDVQLAQDDIDGIQAIYGRSQNPVEPIGPQTPKACDSKLTFDAITTIRGEVMFFKDRFYMRTNPFYPEVELNFISVFWPQLPNGLEAAYEFADRDEVRFFKGNKYWAVQGQNVLHGYPKDIYSSFGFPRTVKHIDAALSEENTGKTYFFVANKYWRYDEYKRSMDPGYPKMIAHDFPGIGHKVDAVFMKDGFFYFFHGTRQYKFDPKTKRILTLQKANSWFNCRKN

SEQ ID NO: 3271 - protein, 450 aa, Artificial Sequence
  MMP-1 variant Q249H
FPATLETQEQDVDLVQKYLEKYYNLKNDGRQVEKRRNSGPVVEKLKQMQEFFGLKVTGKPDAETLKVMKQPRCGVPDVAQFVLTEGNPRWEQTHLTYRIENYTPDLPRADVDHAIEKAFQLWSNVTPLTFTKVSEGQADIMISFVRGDHRDNSPFDGPGGNLAHAFQPGPGIGGDAHFDEDERWTNNFREYNLHRVAAHELGHSLGLSHSTDIGALMYPSYTFSGDVQLAQDDIDGIQAIYGRSQNPVHPIGPQTPKACDSKLTFDAITTIRGEVMFFKDRFYMRTNPFYPEVELNFISVFWPQLPNGLEAAYEFADRDEVRFFKGNKYWAVQGQNVLHGYPKDIYSSFGFPRTVKHIDAALSEENTGKTYFFVANKYWRYDEYKRSMDPGYPKMIAHDFPGIGHKVDAVFMKDGFFYFFHGTRQYKFDPKTKRILTLQKANSWFNCRKN

SEQ ID NO: 3272 - protein, 450 aa, Artificial Sequence
  MMP-1 variant Q249K
FPATLETQEQDVDLVQKYLEKYYNLKNDGRQVEKRRNSGPVVEKLKQMQEFFGLKVTGKPDAETLKVMKQPRCGVPDVAQFVLTEGNPRWEQTHLTYRIENYTPDLPRADVDHAIEKAFQLWSNVTPLTFTKVSEGQADIMISFVRGDHRDNSPFDGPGGNLAHAFQPGPGIGGDAHFDEDERWTNNFREYNLHRVAAHELGHSLGLSHSTDIGALMYPSYTFSGDVQLAQDDIDGIQAIYGRSQNPVKPIGPQTPKACDSKLTFDAITTIRGEVMFFKDRFYMRTNPFYPEVELNFISVFWPQLPNGLEAAYEFADRDEVRFFKGNKYWAVQGQNVLHGYPKDIYSSFGFPRTVKHIDAALSEENTGKTYFFVANKYWRYDEYKRSMDPGYPKMIAHDFPGIGHKVDAVFMKDGFFYFFHGTRQYKFDPKTKRILTLQKANSWFNCRKN

SEQ ID NO: 3273 - protein, 450 aa, Artificial Sequence
  MMP-1 variant Q249R
FPATLETQEQDVDLVQKYLEKYYNLKNDGRQVEKRRNSGPVVEKLKQMQEFFGLKVTGKPDAETLKVMKQPRCGVPDVAQFVLTEGNPRWEQTHLTYRIENYTPDLPRADVDHAIEKAFQLWSNVTPLTFTKVSEGQADIMISFVRGDHRDNSPFDGPGGNLAHAFQPGPGIGGDAHFDEDERWTNNFREYNLHRVAAHELGHSLGLSHSTDIGALMYPSYTFSGDVQLAQDDIDGIQAIYGRSQNPVRPIGPQTPKACDSKLTFDAITTIRGEVMFFKDRFYMRTNPFYPEVELNFISVFWPQLPNGLEAAYEFADRDEVRFFKGNKYWAVQGQNVLHGYPKDIYSSFGFPRTVKHIDAALSEENTGKTYFFVANKYWRYDEYKRSMDPGYPKMIAHDFPGIGHKVDAVFMKDGFFYFFHGTRQYKFDPKTKRILTLQKANSWFNCRKN

SEQ ID NO: 3274 - protein, 450 aa, Artificial Sequence
  MMP-1 variant Q249C
FPATLETQEQDVDLVQKYLEKYYNLKNDGRQVEKRRNSGPVVEKLKQMQEFFGLKVTGKPDAETLKVMKQPRCGVPDVAQFVLTEGNPRWEQTHLTYRIENYTPDLPRADVDHAIEKAFQLWSNVTPLTFTKVSEGQADIMISFVRGDHRDNSPFDGPGGNLAHAFQPGPGIGGDAHFDEDERWTNNFREYNLHRVAAHELGHSLGLSHSTDIGALMYPSYTFSGDVQLAQDDIDGIQAIYGRSQNPVCPIGPQTPKACDSKLTFDAITTIRGEVMFFKDRFYMRTNPFYPEVELNFISVFWPQLPNGLEAAYEFADRDEVRFFKGNKYWAVQGQNVLHGYPKDIYSSFGFPRTVKHIDAALSEENTGKTYFFVANKYWRYDEYKRSMDPGYPKMIAHDFPGIGHKVDAVFMKDGFFYFFHGTRQYKFDPKTKRILTLQKANSWFNCRKN

SEQ ID NO: 3275 - protein, 450 aa, Artificial Sequence
  MMP-1 variant Q249N
FPATLETQEQDVDLVQKYLEKYYNLKNDGRQVEKRRNSGPVVEKLKQMQEFFGLKVTGKPDAETLKVMKQPRCGVPDVAQFVLTEGNPRWEQTHLTYRIENYTPDLPRADVDHAIEKAFQLWSNVTPLTFTKVSEGQADIMISFVRGDHRDNSPFDGPGGNLAHAFQPGPGIGGDAHFDEDERWTNNFREYNLHRVAAHELGHSLGLSHSTDIGALMYPSYTFSGDVQLAQDDIDGIQAIYGRSQNPVNPIGPQTPKACDSKLTFDAITTIRGEVMFFKDRFYMRTNPFYPEVELNFISVFWPQLPNGLEAAYEFADRDEVRFFKGNKYWAVQGQNVLHGYPKDIYSSFGFPRTVKHIDAALSEENTGKTYFFVANKYWRYDEYKRSMDPGYPKMIAHDFPGIGHKVDAVFMKDGFFYFFHGTRQYKFDPKTKRILTLQKANSWFNCRKN

SEQ ID NO: 3276 - protein, 450 aa, Artificial Sequence
  MMP-1 variant Q249T
FPATLETQEQDVDLVQKYLEKYYNLKNDGRQVEKRRNSGPVVEKLKQMQEFFGLKVTGKPDAETLKVMKQPRCGVPDVAQFVLTEGNPRWEQTHLTYRIENYTPDLPRADVDHAIEKAFQLWSNVTPLTFTKVSEGQADIMISFVRGDHRDNSPFDGPGGNLAHAFQPGPGIGGDAHFDEDERWTNNFREYNLHRVAAHELGHSLGLSHSTDIGALMYPSYTFSGDVQLAQDDIDGIQAIYGRSQNPVTPIGPQTPKACDSKLTFDAITTIRGEVMFFKDRFYMRTNPFYPEVELNFISVFWPQLPNGLEAAYEFADRDEVRFFKGNKYWAVQGQNVLHGYPKDIYSSFGFPRTVKHIDAALSEENTGKTYFFVANKYWRYDEYKRSMDPGYPKMIAHDFPGIGHKVDAVFMKDGFFYFFHGTRQYKFDPKTKRILTLQKANSWFNCRKN

SEQ ID NO: 3277 - protein, 450 aa, Artificial Sequence
  MMP-1 variant Q249Y
FPATLETQEQDVDLVQKYLEKYYNLKNDGRQVEKRRNSGPVVEKLKQMQEFFGLKVTGKPDAETLKVMKQPRCGVPDVAQFVLTEGNPRWEQTHLTYRIENYTPDLPRADVDHAIEKAFQLWSNVTPLTFTKVSEGQADIMISFVRGDHRDNSPFDGPGGNLAHAFQPGPGIGGDAHFDEDERWTNNFREYNLHRVAAHELGHSLGLSHSTDIGALMYPSYTFSGDVQLAQDDIDGIQAIYGRSQNPVYPIGPQTPKACDSKLTFDAITTIRGEVMFFKDRFYMRTNPFYPEVELNFISVFWPQLPNGLEAAYEFADRDEVRFFKGNKYWAVQGQNVLHGYPKDIYSSFGFPRTVKHIDAALSEENTGKTYFFVANKYWRYDEYKRSMDPGYPKMIAHDFPGIGHKVDAVFMKDGFFYFFHGTRQYKFDPKTKRILTLQKANSWFNCRKN

SEQ ID NO: 3278 - protein, 450 aa, Artificial Sequence
  MMP-1 variant Q249S
FPATLETQEQDVDLVQKYLEKYYNLKNDGRQVEKRRNSGPVVEKLKQMQEFFGLKVTGKPDAETLKVMKQPRCGVPDVAQFVLTEGNPRWEQTHLTYRIENYTPDLPRADVDHAIEKAFQLWSNVTPLTFTKVSEGQADIMISFVRGDHRDNSPFDGPGGNLAHAFQPGPGIGGDAHFDEDERWTNNFREYNLHRVAAHELGHSLGLSHSTDIGALMYPSYTFSGDVQLAQDDIDGIQAIYGRSQNPVSPIGPQTPKACDSKLTFDAITTIRGEVMFFKDRFYMRTNPFYPEVELNFISVFWPQLPNGLEAAYEFADRDEVRFFKGNKYWAVQGQNVLHGYPKDIYSSFGFPRTVKHIDAALSEENTGKTYFFVANKYWRYDEYKRSMDPGYPKMIAHDFPGIGHKVDAVFMKDGFFYFFHGTRQYKFDPKTKRILTLQKANSWFNCRKN

SEQ ID NO: 3279 - protein, 450 aa, Artificial Sequence
  MMP-1 variant Q249G
FPATLETQEQDVDLVQKYLEKYYNLKNDGRQVEKRRNSGPVVEKLKQMQEFFGLKVTGKPDAETLKVMKQPRCGVPDVAQFVLTEGNPRWEQTHLTYRIENYTPDLPRADVDHAIEKAFQLWSNVTPLTFTKVSEGQADIMISFVRGDHRDNSPFDGPGGNLAHAFQPGPGIGGDAHFDEDERWTNNFREYNLHRVAAHELGHSLGLSHSTDIGALMYPSYTFSGDVQLAQDDIDGIQAIYGRSQNPVGPIGPQTPKACDSKLTFDAITTIRGEVMFFKDRFYMRTNPFYPEVELNFISVFWPQLPNGLEAAYEFADRDEVRFFKGNKYWAVQGQNVLHGYPKDIYSSFGFPRTVKHIDAALSEENTGKTYFFVANKYWRYDEYKRSMDPGYPKMIAHDFPGIGHKVDAVFMKDGFFYFFHGTRQYKFDPKTKRILTLQKANSWFNCRKN

SEQ ID NO: 3280 - protein, 450 aa, Artificial Sequence
  MMP-1 variant Q249F
FPATLETQEQDVDLVQKYLEKYYNLKNDGRQVEKRRNSGPVVEKLKQMQEFFGLKVTGKPDAETLKVMKQPRCGVPDVAQFVLTEGNPRWEQTHLTYRIENYTPDLPRADVDHAIEKAFQLWSNVTPLTFTKVSEGQADIMISFVRGDHRDNSPFDGPGGNLAHAFQPGPGIGGDAHFDEDERWTNNFREYNLHRVAAHELGHSLGLSHSTDIGALMYPSYTFSGDVQLAQDDIDGIQAIYGRSQNPVFPIGPQTPKACDSKLTFDAITTIRGEVMFFKDRFYMRTNPFYPEVELNFISVFWPQLPNGLEAAYEFADRDEVRFFKGNKYWAVQGQNVLHGYPKDIYSSFGFPRTVKHIDAALSEENTGKTYFFVANKYWRYDEYKRSMDPGYPKMIAHDFPGIGHKVDAVFMKDGFFYFFHGTRQYKFDPKTKRILTLQKANSWFNCRKN

SEQ ID NO: 3281 - protein, 450 aa, Artificial Sequence
  MMP-1 variant Q249M
FPATLETQEQDVDLVQKYLEKYYNLKNDGRQVEKRRNSGPVVEKLKQMQEFFGLKVTGKPDAETLKVMKQPRCGVPDVAQFVLTEGNPRWEQTHLTYRIENYTPDLPRADVDHAIEKAFQLWSNVTPLTFTKVSEGQADIMISFVRGDHRDNSPFDGPGGNLAHAFQPGPGIGGDAHFDEDERWTNNFREYNLHRVAAHELGHSLGLSHSTDIGALMYPSYTFSGDVQLAQDDIDGIQAIYGRSQNPVMPIGPQTPKACDSKLTFDAITTIRGEVMFFKDRFYMRTNPFYPEVELNFISVFWPQLPNGLEAAYEFADRDEVRFFKGNKYWAVQGQNVLHGYPKDIYSSFGFPRTVKHIDAALSEENTGKTYFFVANKYWRYDEYKRSMDPGYPKMIAHDFPGIGHKVDAVFMKDGFFYFFHGTRQYKFDPKTKRILTLQKANSWFNCRKN

SEQ ID NO: 3282 - protein, 450 aa, Artificial Sequence
  MMP-1 variant Q249W
FPATLETQEQDVDLVQKYLEKYYNLKNDGRQVEKRRNSGPVVEKLKQMQEFFGLKVTGKPDAETLKVMKQPRCGVPDVAQFVLTEGNPRWEQTHLTYRIENYTPDLPRADVDHAIEKAFQLWSNVTPLTFTKVSEGQADIMISFVRGDHRDNSPFDGPGGNLAHAFQPGPGIGGDAHFDEDERWTNNFREYNLHRVAAHELGHSLGLSHSTDIGALMYPSYTFSGDVQLAQDDIDGIQAIYGRSQNPVWPIGPQTPKACDSKLTFDAITTIRGEVMFFKDRFYMRTNPFYPEVELNFISVFWPQLPNGLEAAYEFADRDEVRFFKGNKYWAVQGQNVLHGYPKDIYSSFGFPRTVKHIDAALSEENTGKTYFFVANKYWRYDEYKRSMDPGYPKMIAHDFPGIGHKVDAVFMKDGFFYFFHGTRQYKFDPKTKRILTLQKANSWFNCRKN

SEQ ID NO: 3283 - protein, 450 aa, Artificial Sequence
  MMP-1 variant Q249I
FPATLETQEQDVDLVQKYLEKYYNLKNDGRQVEKRRNSGPVVEKLKQMQEFFGLKVTGKPDAETLKVMKQPRCGVPDVAQFVLTEGNPRWEQTHLTYRIENYTPDLPRADVDHAIEKAFQLWSNVTPLTFTKVSEGQADIMISFVRGDHRDNSPFDGPGGNLAHAFQPGPGIGGDAHFDEDERWTNNFREYNLHRVAAHELGHSLGLSHSTDIGALMYPSYTFSGDVQLAQDDIDGIQAIYGRSQNPVIPIGPQTPKACDSKLTFDAITTIRGEVMFFKDRFYMRTNPFYPEVELNFISVFWPQLPNGLEAAYEFADRDEVRFFKGNKYWAVQGQNVLHGYPKDIYSSFGFPRTVKHIDAALSEENTGKTYFFVANKYWRYDEYKRSMDPGYPKMIAHDFPGIGHKVDAVFMKDGFFYFFHGTRQYKFDPKTKRILTLQKANSWFNCRKN

SEQ ID NO: 3284 - protein, 450 aa, Artificial Sequence
  MMP-1 variant Q249V
FPATLETQEQDVDLVQKYLEKYYNLKNDGRQVEKRRNSGPVVEKLKQMQEFFGLKVTGKPDAETLKVMKQPRCGVPDVAQFVLTEGNPRWEQTHLTYRIENYTPDLPRADVDHAIEKAFQLWSNVTPLTFTKVSEGQADIMISFVRGDHRDNSPFDGPGGNLAHAFQPGPGIGGDAHFDEDERWTNNFREYNLHRVAAHELGHSLGLSHSTDIGALMYPSYTFSGDVQLAQDDIDGIQAIYGRSQNPVVPIGPQTPKACDSKLTFDAITTIRGEVMFFKDRFYMRTNPFYPEVELNFISVFWPQLPNGLEAAYEFADRDEVRFFKGNKYWAVQGQNVLHGYPKDIYSSFGFPRTVKHIDAALSEENTGKTYFFVANKYWRYDEYKRSMDPGYPKMIAHDFPGIGHKVDAVFMKDGFFYFFHGTRQYKFDPKTKRILTLQKANSWFNCRKN

SEQ ID NO: 3285 - protein, 450 aa, Artificial Sequence
  MMP-1 variant Q249L
FPATLETQEQDVDLVQKYLEKYYNLKNDGRQVEKRRNSGPVVEKLKQMQEFFGLKVTGKPDAETLKVMKQPRCGVPDVAQFVLTEGNPRWEQTHLTYRIENYTPDLPRADVDHAIEKAFQLWSNVTPLTFTKVSEGQADIMISFVRGDHRDNSPFDGPGGNLAHAFQPGPGIGGDAHFDEDERWTNNFREYNLHRVAAHELGHSLGLSHSTDIGALMYPSYTFSGDVQLAQDDIDGIQAIYGRSQNPVLPIGPQTPKACDSKLTFDAITTIRGEVMFFKDRFYMRTNPFYPEVELNFISVFWPQLPNGLEAAYEFADRDEVRFFKGNKYWAVQGQNVLHGYPKDIYSSFGFPRTVKHIDAALSEENTGKTYFFVANKYWRYDEYKRSMDPGYPKMIAHDFPGIGHKVDAVFMKDGFFYFFHGTRQYKFDPKTKRILTLQKANSWFNCRKN

SEQ ID NO: 3286 - protein, 450 aa, Artificial Sequence
  MMP-1 variant Q249A
FPATLETQEQDVDLVQKYLEKYYNLKNDGRQVEKRRNSGPVVEKLKQMQEFFGLKVTGKPDAETLKVMKQPRCGVPDVAQFVLTEGNPRWEQTHLTYRIENYTPDLPRADVDHAIEKAFQLWSNVTPLTFTKVSEGQADIMISFVRGDHRDNSPFDGPGGNLAHAFQPGPGIGGDAHFDEDERWTNNFREYNLHRVAAHELGHSLGLSHSTDIGALMYPSYTFSGDVQLAQDDIDGIQAIYGRSQNPVAPIGPQTPKACDSKLTFDAITTIRGEVMFFKDRFYMRTNPFYPEVELNFISVFWPQLPNGLEAAYEFADRDEVRFFKGNKYWAVQGQNVLHGYPKDIYSSFGFPRTVKHIDAALSEENTGKTYFFVANKYWRYDEYKRSMDPGYPKMIAHDFPGIGHKVDAVFMKDGFFYFFHGTRQYKFDPKTKRILTLQKANSWFNCRKN

SEQ ID NO: 3287 - protein, 450 aa, Artificial Sequence
  MMP-1 variant Q249P
FPATLETQEQDVDLVQKYLEKYYNLKNDGRQVEKRRNSGPVVEKLKQMQEFFGLKVTGKPDAETLKVMKQPRCGVPDVAQFVLTEGNPRWEQTHLTYRIENYTPDLPRADVDHAIEKAFQLWSNVTPLTFTKVSEGQADIMISFVRGDHRDNSPFDGPGGNLAHAFQPGPGIGGDAHFDEDERWTNNFREYNLHRVAAHELGHSLGLSHSTDIGALMYPSYTFSGDVQLAQDDIDGIQAIYGRSQNPVPPIGPQTPKACDSKLTFDAITTIRGEVMFFKDRFYMRTNPFYPEVELNFISVFWPQLPNGLEAAYEFADRDEVRFFKGNKYWAVQGQNVLHGYPKDIYSSFGFPRTVKHIDAALSEENTGKTYFFVANKYWRYDEYKRSMDPGYPKMIAHDFPGIGHKVDAVFMKDGFFYFFHGTRQYKFDPKTKRILTLQKANSWFNCRKN

SEQ ID NO: 3288 - protein, 450 aa, Artificial Sequence
  MMP-1 variant P250D
FPATLETQEQDVDLVQKYLEKYYNLKNDGRQVEKRRNSGPVVEKLKQMQEFFGLKVTGKPDAETLKVMKQPRCGVPDVAQFVLTEGNPRWEQTHLTYRIENYTPDLPRADVDHAIEKAFQLWSNVTPLTFTKVSEGQADIMISFVRGDHRDNSPFDGPGGNLAHAFQPGPGIGGDAHFDEDERWTNNFREYNLHRVAAHELGHSLGLSHSTDIGALMYPSYTFSGDVQLAQDDIDGIQAIYGRSQNPVQDIGPQTPKACDSKLTFDAITTIRGEVMFFKDRFYMRTNPFYPEVELNFISVFWPQLPNGLEAAYEFADRDEVRFFKGNKYWAVQGQNVLHGYPKDIYSSFGFPRTVKHIDAALSEENTGKTYFFVANKYWRYDEYKRSMDPGYPKMIAHDFPGIGHKVDAVFMKDGFFYFFHGTRQYKFDPKTKRILTLQKANSWFNCRKN

SEQ ID NO: 3289 - protein, 450 aa, Artificial Sequence
  MMP-1 variant P250E
FPATLETQEQDVDLVQKYLEKYYNLKNDGRQVEKRRNSGPVVEKLKQMQEFFGLKVTGKPDAETLKVMKQPRCGVPDVAQFVLTEGNPRWEQTHLTYRIENYTPDLPRADVDHAIEKAFQLWSNVTPLTFTKVSEGQADIMISFVRGDHRDNSPFDGPGGNLAHAFQPGPGIGGDAHFDEDERWTNNFREYNLHRVAAHELGHSLGLSHSTDIGALMYPSYTFSGDVQLAQDDIDGIQAIYGRSQNPVQEIGPQTPKACDSKLTFDAITTIRGEVMFFKDRFYMRTNPFYPEVELNFISVFWPQLPNGLEAAYEFADRDEVRFFKGNKYWAVQGQNVLHGYPKDIYSSFGFPRTVKHIDAALSEENTGKTYFFVANKYWRYDEYKRSMDPGYPKMIAHDFPGIGHKVDAVFMKDGFFYFFHGTRQYKFDPKTKRILTLQKANSWFNCRKN

SEQ ID NO: 3290 - protein, 450 aa, Artificial Sequence
  MMP-1 variant P250H
FPATLETQEQDVDLVQKYLEKYYNLKNDGRQVEKRRNSGPVVEKLKQMQEFFGLKVTGKPDAETLKVMKQPRCGVPDVAQFVLTEGNPRWEQTHLTYRIENYTPDLPRADVDHAIEKAFQLWSNVTPLTFTKVSEGQADIMISFVRGDHRDNSPFDGPGGNLAHAFQPGPGIGGDAHFDEDERWTNNFREYNLHRVAAHELGHSLGLSHSTDIGALMYPSYTFSGDVQLAQDDIDGIQAIYGRSQNPVQHIGPQTPKACDSKLTFDAITTIRGEVMFFKDRFYMRTNPFYPEVELNFISVFWPQLPNGLEAAYEFADRDEVRFFKGNKYWAVQGQNVLHGYPKDIYSSFGFPRTVKHIDAALSEENTGKTYFFVANKYWRYDEYKRSMDPGYPKMIAHDFPGIGHKVDAVFMKDGFFYFFHGTRQYKFDPKTKRILTLQKANSWFNCRKN

SEQ ID NO: 3291 - protein, 450 aa, Artificial Sequence
  MMP-1 variant P250K
FPATLETQEQDVDLVQKYLEKYYNLKNDGRQVEKRRNSGPVVEKLKQMQEFFGLKVTGKPDAETLKVMKQPRCGVPDVAQFVLTEGNPRWEQTHLTYRIENYTPDLPRADVDHAIEKAFQLWSNVTPLTFTKVSEGQADIMISFVRGDHRDNSPFDGPGGNLAHAFQPGPGIGGDAHFDEDERWTNNFREYNLHRVAAHELGHSLGLSHSTDIGALMYPSYTFSGDVQLAQDDIDGIQAIYGRSQNPVQKIGPQTPKACDSKLTFDAITTIRGEVMFFKDRFYMRTNPFYPEVELNFISVFWPQLPNGLEAAYEFADRDEVRFFKGNKYWAVQGQNVLHGYPKDIYSSFGFPRTVKHIDAALSEENTGKTYFFVANKYWRYDEYKRSMDPGYPKMIAHDFPGIGHKVDAVFMKDGFFYFFHGTRQYKFDPKTKRILTLQKANSWFNCRKN

SEQ ID NO: 3292 - protein, 450 aa, Artificial Sequence
  MMP-1 variant P250R
FPATLETQEQDVDLVQKYLEKYYNLKNDGRQVEKRRNSGPVVEKLKQMQEFFGLKVTGKPDAETLKVMKQPRCGVPDVAQFVLTEGNPRWEQTHLTYRIENYTPDLPRADVDHAIEKAFQLWSNVTPLTFTKVSEGQADIMISFVRGDHRDNSPFDGPGGNLAHAFQPGPGIGGDAHFDEDERWTNNFREYNLHRVAAHELGHSLGLSHSTDIGALMYPSYTFSGDVQLAQDDIDGIQAIYGRSQNPVQRIGPQTPKACDSKLTFDAITTIRGEVMFFKDRFYMRTNPFYPEVELNFISVFWPQLPNGLEAAYEFADRDEVRFFKGNKYWAVQGQNVLHGYPKDIYSSFGFPRTVKHIDAALSEENTGKTYFFVANKYWRYDEYKRSMDPGYPKMIAHDFPGIGHKVDAVFMKDGFFYFFHGTRQYKFDPKTKRILTLQKANSWFNCRKN

SEQ ID NO: 3293 - protein, 450 aa, Artificial Sequence
  MMP-1 variant P250C
FPATLETQEQDVDLVQKYLEKYYNLKNDGRQVEKRRNSGPVVEKLKQMQEFFGLKVTGKPDAETLKVMKQPRCGVPDVAQFVLTEGNPRWEQTHLTYRIENYTPDLPRADVDHAIEKAFQLWSNVTPLTFTKVSEGQADIMISFVRGDHRDNSPFDGPGGNLAHAFQPGPGIGGDAHFDEDERWTNNFREYNLHRVAAHELGHSLGLSHSTDIGALMYPSYTFSGDVQLAQDDIDGIQAIYGRSQNPVQCIGPQTPKACDSKLTFDAITTIRGEVMFFKDRFYMRTNPFYPEVELNFISVFWPQLPNGLEAAYEFADRDEVRFFKGNKYWAVQGQNVLHGYPKDIYSSFGFPRTVKHIDAALSEENTGKTYFFVANKYWRYDEYKRSMDPGYPKMIAHDFPGIGHKVDAVFMKDGFFYFFHGTRQYKFDPKTKRILTLQKANSWFNCRKN

SEQ ID NO: 3294 - protein, 450 aa, Artificial Sequence
  MMP-1 variant P250N
FPATLETQEQDVDLVQKYLEKYYNLKNDGRQVEKRRNSGPVVEKLKQMQEFFGLKVTGKPDAETLKVMKQPRCGVPDVAQFVLTEGNPRWEQTHLTYRIENYTPDLPRADVDHAIEKAFQLWSNVTPLTFTKVSEGQADIMISFVRGDHRDNSPFDGPGGNLAHAFQPGPGIGGDAHFDEDERWTNNFREYNLHRVAAHELGHSLGLSHSTDIGALMYPSYTFSGDVQLAQDDIDGIQAIYGRSQNPVQNIGPQTPKACDSKLTFDAITTIRGEVMFFKDRFYMRTNPFYPEVELNFISVFWPQLPNGLEAAYEFADRDEVRFFKGNKYWAVQGQNVLHGYPKDIYSSFGFPRTVKHIDAALSEENTGKTYFFVANKYWRYDEYKRSMDPGYPKMIAHDFPGIGHKVDAVFMKDGFFYFFHGTRQYKFDPKTKRILTLQKANSWFNCRKN

SEQ ID NO: 3295 - protein, 450 aa, Artificial Sequence
  MMP-1 variant P250Q
FPATLETQEQDVDLVQKYLEKYYNLKNDGRQVEKRRNSGPVVEKLKQMQEFFGLKVTGKPDAETLKVMKQPRCGVPDVAQFVLTEGNPRWEQTHLTYRIENYTPDLPRADVDHAIEKAFQLWSNVTPLTFTKVSEGQADIMISFVRGDHRDNSPFDGPGGNLAHAFQPGPGIGGDAHFDEDERWTNNFREYNLHRVAAHELGHSLGLSHSTDIGALMYPSYTFSGDVQLAQDDIDGIQAIYGRSQNPVQQIGPQTPKACDSKLTFDAITTIRGEVMFFKDRFYMRTNPFYPEVELNFISVFWPQLPNGLEAAYEFADRDEVRFFKGNKYWAVQGQNVLHGYPKDIYSSFGFPRTVKHIDAALSEENTGKTYFFVANKYWRYDEYKRSMDPGYPKMIAHDFPGIGHKVDAVFMKDGFFYFFHGTRQYKFDPKTKRILTLQKANSWFNCRKN

SEQ ID NO: 3296 - protein, 450 aa, Artificial Sequence
  MMP-1 variant P250T
FPATLETQEQDVDLVQKYLEKYYNLKNDGRQVEKRRNSGPVVEKLKQMQEFFGLKVTGKPDAETLKVMKQPRCGVPDVAQFVLTEGNPRWEQTHLTYRIENYTPDLPRADVDHAIEKAFQLWSNVTPLTFTKVSEGQADIMISFVRGDHRDNSPFDGPGGNLAHAFQPGPGIGGDAHFDEDERWTNNFREYNLHRVAAHELGHSLGLSHSTDIGALMYPSYTFSGDVQLAQDDIDGIQAIYGRSQNPVQTIGPQTPKACDSKLTFDAITTIRGEVMFFKDRFYMRTNPFYPEVELNFISVFWPQLPNGLEAAYEFADRDEVRFFKGNKYWAVQGQNVLHGYPKDIYSSFGFPRTVKHIDAALSEENTGKTYFFVANKYWRYDEYKRSMDPGYPKMIAHDFPGIGHKVDAVFMKDGFFYFFHGTRQYKFDPKTKRILTLQKANSWFNCRKN

SEQ ID NO: 3297 - protein, 450 aa, Artificial Sequence
  MMP-1 variant P250Y
FPATLETQEQDVDLVQKYLEKYYNLKNDGRQVEKRRNSGPVVEKLKQMQEFFGLKVTGKPDAETLKVMKQPRCGVPDVAQFVLTEGNPRWEQTHLTYRIENYTPDLPRADVDHAIEKAFQLWSNVTPLTFTKVSEGQADIMISFVRGDHRDNSPFDGPGGNLAHAFQPGPGIGGDAHFDEDERWTNNFREYNLHRVAAHELGHSLGLSHSTDIGALMYPSYTFSGDVQLAQDDIDGIQAIYGRSQNPVQYIGPQTPKACDSKLTFDAITTIRGEVMFFKDRFYMRTNPFYPEVELNFISVFWPQLPNGLEAAYEFADRDEVRFFKGNKYWAVQGQNVLHGYPKDIYSSFGFPRTVKHIDAALSEENTGKTYFFVANKYWRYDEYKRSMDPGYPKMIAHDFPGIGHKVDAVFMKDGFFYFFHGTRQYKFDPKTKRILTLQKANSWFNCRKN

SEQ ID NO: 3298 - protein, 450 aa, Artificial Sequence
  MMP-1 variant P250S
FPATLETQEQDVDLVQKYLEKYYNLKNDGRQVEKRRNSGPVVEKLKQMQEFFGLKVTGKPDAETLKVMKQPRCGVPDVAQFVLTEGNPRWEQTHLTYRIENYTPDLPRADVDHAIEKAFQLWSNVTPLTFTKVSEGQADIMISFVRGDHRDNSPFDGPGGNLAHAFQPGPGIGGDAHFDEDERWTNNFREYNLHRVAAHELGHSLGLSHSTDIGALMYPSYTFSGDVQLAQDDIDGIQAIYGRSQNPVQSIGPQTPKACDSKLTFDAITTIRGEVMFFKDRFYMRTNPFYPEVELNFISVFWPQLPNGLEAAYEFADRDEVRFFKGNKYWAVQGQNVLHGYPKDIYSSFGFPRTVKHIDAALSEENTGKTYFFVANKYWRYDEYKRSMDPGYPKMIAHDFPGIGHKVDAVFMKDGFFYFFHGTRQYKFDPKTKRILTLQKANSWFNCRKN

SEQ ID NO: 3299 - protein, 450 aa, Artificial Sequence
  MMP-1 variant P250G
FPATLETQEQDVDLVQKYLEKYYNLKNDGRQVEKRRNSGPVVEKLKQMQEFFGLKVTGKPDAETLKVMKQPRCGVPDVAQFVLTEGNPRWEQTHLTYRIENYTPDLPRADVDHAIEKAFQLWSNVTPLTFTKVSEGQADIMISFVRGDHRDNSPFDGPGGNLAHAFQPGPGIGGDAHFDEDERWTNNFREYNLHRVAAHELGHSLGLSHSTDIGALMYPSYTFSGDVQLAQDDIDGIQAIYGRSQNPVQGIGPQTPKACDSKLTFDAITTIRGEVMFFKDRFYMRTNPFYPEVELNFISVFWPQLPNGLEAAYEFADRDEVRFFKGNKYWAVQGQNVLHGYPKDIYSSFGFPRTVKHIDAALSEENTGKTYFFVANKYWRYDEYKRSMDPGYPKMIAHDFPGIGHKVDAVFMKDGFFYFFHGTRQYKFDPKTKRILTLQKANSWFNCRKN

SEQ ID NO: 3300 - protein, 450 aa, Artificial Sequence
  MMP-1 variant P250F
FPATLETQEQDVDLVQKYLEKYYNLKNDGRQVEKRRNSGPVVEKLKQMQEFFGLKVTGKPDAETLKVMKQPRCGVPDVAQFVLTEGNPRWEQTHLTYRIENYTPDLPRADVDHAIEKAFQLWSNVTPLTFTKVSEGQADIMISFVRGDHRDNSPFDGPGGNLAHAFQPGPGIGGDAHFDEDERWTNNFREYNLHRVAAHELGHSLGLSHSTDIGALMYPSYTFSGDVQLAQDDIDGIQAIYGRSQNPVQFIGPQTPKACDSKLTFDAITTIRGEVMFFKDRFYMRTNPFYPEVELNFISVFWPQLPNGLEAAYEFADRDEVRFFKGNKYWAVQGQNVLHGYPKDIYSSFGFPRTVKHIDAALSEENTGKTYFFVANKYWRYDEYKRSMDPGYPKMIAHDFPGIGHKVDAVFMKDGFFYFFHGTRQYKFDPKTKRILTLQKANSWFNCRKN

SEQ ID NO: 3301 - protein, 450 aa, Artificial Sequence
  MMP-1 variant P250M
FPATLETQEQDVDLVQKYLEKYYNLKNDGRQVEKRRNSGPVVEKLKQMQEFFGLKVTGKPDAETLKVMKQPRCGVPDVAQFVLTEGNPRWEQTHLTYRIENYTPDLPRADVDHAIEKAFQLWSNVTPLTFTKVSEGQADIMISFVRGDHRDNSPFDGPGGNLAHAFQPGPGIGGDAHFDEDERWTNNFREYNLHRVAAHELGHSLGLSHSTDIGALMYPSYTFSGDVQLAQDDIDGIQAIYGRSQNPVQMIGPQTPKACDSKLTFDAITTIRGEVMFFKDRFYMRTNPFYPEVELNFISVFWPQLPNGLEAAYEFADRDEVRFFKGNKYWAVQGQNVLHGYPKDIYSSFGFPRTVKHIDAALSEENTGKTYFFVANKYWRYDEYKRSMDPGYPKMIAHDFPGIGHKVDAVFMKDGFFYFFHGTRQYKFDPKTKRILTLQKANSWFNCRKN

SEQ ID NO: 3302 - protein, 450 aa, Artificial Sequence
  MMP-1 variant P250W
FPATLETQEQDVDLVQKYLEKYYNLKNDGRQVEKRRNSGPVVEKLKQMQEFFGLKVTGKPDAETLKVMKQPRCGVPDVAQFVLTEGNPRWEQTHLTYRIENYTPDLPRADVDHAIEKAFQLWSNVTPLTFTKVSEGQADIMISFVRGDHRDNSPFDGPGGNLAHAFQPGPGIGGDAHFDEDERWTNNFREYNLHRVAAHELGHSLGLSHSTDIGALMYPSYTFSGDVQLAQDDIDGIQAIYGRSQNPVQWIGPQTPKACDSKLTFDAITTIRGEVMFFKDRFYMRTNPFYPEVELNFISVFWPQLPNGLEAAYEFADRDEVRFFKGNKYWAVQGQNVLHGYPKDIYSSFGFPRTVKHIDAALSEENTGKTYFFVANKYWRYDEYKRSMDPGYPKMIAHDFPGIGHKVDAVFMKDGFFYFFHGTRQYKFDPKTKRILTLQKANSWFNCRKN

SEQ ID NO: 3303 - protein, 450 aa, Artificial Sequence
  MMP-1 variant P250I
FPATLETQEQDVDLVQKYLEKYYNLKNDGRQVEKRRNSGPVVEKLKQMQEFFGLKVTGKPDAETLKVMKQPRCGVPDVAQFVLTEGNPRWEQTHLTYRIENYTPDLPRADVDHAIEKAFQLWSNVTPLTFTKVSEGQADIMISFVRGDHRDNSPFDGPGGNLAHAFQPGPGIGGDAHFDEDERWTNNFREYNLHRVAAHELGHSLGLSHSTDIGALMYPSYTFSGDVQLAQDDIDGIQAIYGRSQNPVQIIGPQTPKACDSKLTFDAITTIRGEVMFFKDRFYMRTNPFYPEVELNFISVFWPQLPNGLEAAYEFADRDEVRFFKGNKYWAVQGQNVLHGYPKDIYSSFGFPRTVKHIDAALSEENTGKTYFFVANKYWRYDEYKRSMDPGYPKMIAHDFPGIGHKVDAVFMKDGFFYFFHGTRQYKFDPKTKRILTLQKANSWFNCRKN

SEQ ID NO: 3304 - protein, 450 aa, Artificial Sequence
  MMP-1 variant P250V
FPATLETQEQDVDLVQKYLEKYYNLKNDGRQVEKRRNSGPVVEKLKQMQEFFGLKVTGKPDAETLKVMKQPRCGVPDVAQFVLTEGNPRWEQTHLTYRIENYTPDLPRADVDHAIEKAFQLWSNVTPLTFTKVSEGQADIMISFVRGDHRDNSPFDGPGGNLAHAFQPGPGIGGDAHFDEDERWTNNFREYNLHRVAAHELGHSLGLSHSTDIGALMYPSYTFSGDVQLAQDDIDGIQAIYGRSQNPVQVIGPQTPKACDSKLTFDAITTIRGEVMFFKDRFYMRTNPFYPEVELNFISVFWPQLPNGLEAAYEFADRDEVRFFKGNKYWAVQGQNVLHGYPKDIYSSFGFPRTVKHIDAALSEENTGKTYFFVANKYWRYDEYKRSMDPGYPKMIAHDFPGIGHKVDAVFMKDGFFYFFHGTRQYKFDPKTKRILTLQKANSWFNCRKN

SEQ ID NO: 3305 - protein, 450 aa, Artificial Sequence
  MMP-1 variant P250L
FPATLETQEQDVDLVQKYLEKYYNLKNDGRQVEKRRNSGPVVEKLKQMQEFFGLKVTGKPDAETLKVMKQPRCGVPDVAQFVLTEGNPRWEQTHLTYRIENYTPDLPRADVDHAIEKAFQLWSNVTPLTFTKVSEGQADIMISFVRGDHRDNSPFDGPGGNLAHAFQPGPGIGGDAHFDEDERWTNNFREYNLHRVAAHELGHSLGLSHSTDIGALMYPSYTFSGDVQLAQDDIDGIQAIYGRSQNPVQLIGPQTPKACDSKLTFDAITTIRGEVMFFKDRFYMRTNPFYPEVELNFISVFWPQLPNGLEAAYEFADRDEVRFFKGNKYWAVQGQNVLHGYPKDIYSSFGFPRTVKHIDAALSEENTGKTYFFVANKYWRYDEYKRSMDPGYPKMIAHDFPGIGHKVDAVFMKDGFFYFFHGTRQYKFDPKTKRILTLQKANSWFNCRKN

SEQ ID NO: 3306 - protein, 450 aa, Artificial Sequence
  MMP-1 variant P250A
FPATLETQEQDVDLVQKYLEKYYNLKNDGRQVEKRRNSGPVVEKLKQMQEFFGLKVTGKPDAETLKVMKQPRCGVPDVAQFVLTEGNPRWEQTHLTYRIENYTPDLPRADVDHAIEKAFQLWSNVTPLTFTKVSEGQADIMISFVRGDHRDNSPFDGPGGNLAHAFQPGPGIGGDAHFDEDERWTNNFREYNLHRVAAHELGHSLGLSHSTDIGALMYPSYTFSGDVQLAQDDIDGIQAIYGRSQNPVQAIGPQTPKACDSKLTFDAITTIRGEVMFFKDRFYMRTNPFYPEVELNFISVFWPQLPNGLEAAYEFADRDEVRFFKGNKYWAVQGQNVLHGYPKDIYSSFGFPRTVKHIDAALSEENTGKTYFFVANKYWRYDEYKRSMDPGYPKMIAHDFPGIGHKVDAVFMKDGFFYFFHGTRQYKFDPKTKRILTLQKANSWFNCRKN

SEQ ID NO: 3307 - protein, 450 aa, Artificial Sequence
  MMP-1 variant I251D
FPATLETQEQDVDLVQKYLEKYYNLKNDGRQVEKRRNSGPVVEKLKQMQEFFGLKVTGKPDAETLKVMKQPRCGVPDVAQFVLTEGNPRWEQTHLTYRIENYTPDLPRADVDHAIEKAFQLWSNVTPLTFTKVSEGQADIMISFVRGDHRDNSPFDGPGGNLAHAFQPGPGIGGDAHFDEDERWTNNFREYNLHRVAAHELGHSLGLSHSTDIGALMYPSYTFSGDVQLAQDDIDGIQAIYGRSQNPVQPDGPQTPKACDSKLTFDAITTIRGEVMFFKDRFYMRTNPFYPEVELNFISVFWPQLPNGLEAAYEFADRDEVRFFKGNKYWAVQGQNVLHGYPKDIYSSFGFPRTVKHIDAALSEENTGKTYFFVANKYWRYDEYKRSMDPGYPKMIAHDFPGIGHKVDAVFMKDGFFYFFHGTRQYKFDPKTKRILTLQKANSWFNCRKN

SEQ ID NO: 3308 - protein, 450 aa, Artificial Sequence; identical to SEQ ID NO: 3307
  MMP-1 variant I251E

SEQ ID NO: 3309 - protein, 450 aa, Artificial Sequence
  MMP-1 variant I251H
FPATLETQEQDVDLVQKYLEKYYNLKNDGRQVEKRRNSGPVVEKLKQMQEFFGLKVTGKPDAETLKVMKQPRCGVPDVAQFVLTEGNPRWEQTHLTYRIENYTPDLPRADVDHAIEKAFQLWSNVTPLTFTKVSEGQADIMISFVRGDHRDNSPFDGPGGNLAHAFQPGPGIGGDAHFDEDERWTNNFREYNLHRVAAHELGHSLGLSHSTDIGALMYPSYTFSGDVQLAQDDIDGIQAIYGRSQNPVQPHGPQTPKACDSKLTFDAITTIRGEVMFFKDRFYMRTNPFYPEVELNFISVFWPQLPNGLEAAYEFADRDEVRFFKGNKYWAVQGQNVLHGYPKDIYSSFGFPRTVKHIDAALSEENTGKTYFFVANKYWRYDEYKRSMDPGYPKMIAHDFPGIGHKVDAVFMKDGFFYFFHGTRQYKFDPKTKRILTLQKANSWFNCRKN

SEQ ID NO: 3310 - protein, 450 aa, Artificial Sequence
  MMP-1 variant I251K
FPATLETQEQDVDLVQKYLEKYYNLKNDGRQVEKRRNSGPVVEKLKQMQEFFGLKVTGKPDAETLKVMKQPRCGVPDVAQFVLTEGNPRWEQTHLTYRIENYTPDLPRADVDHAIEKAFQLWSNVTPLTFTKVSEGQADIMISFVRGDHRDNSPFDGPGGNLAHAFQPGPGIGGDAHFDEDERWTNNFREYNLHRVAAHELGHSLGLSHSTDIGALMYPSYTFSGDVQLAQDDIDGIQAIYGRSQNPVQPKGPQTPKACDSKLTFDAITTIRGEVMFFKDRFYMRTNPFYPEVELNFISVFWPQLPNGLEAAYEFADRDEVRFFKGNKYWAVQGQNVLHGYPKDIYSSFGFPRTVKHIDAALSEENTGKTYFFVANKYWRYDEYKRSMDPGYPKMIAHDFPGIGHKVDAVFMKDGFFYFFHGTRQYKFDPKTKRILTLQKANSWFNCRKN

SEQ ID NO: 3311 - protein, 450 aa, Artificial Sequence
  MMP-1 variant I251R
FPATLETQEQDVDLVQKYLEKYYNLKNDGRQVEKRRNSGPVVEKLKQMQEFFGLKVTGKPDAETLKVMKQPRCGVPDVAQFVLTEGNPRWEQTHLTYRIENYTPDLPRADVDHAIEKAFQLWSNVTPLTFTKVSEGQADIMISFVRGDHRDNSPFDGPGGNLAHAFQPGPGIGGDAHFDEDERWTNNFREYNLHRVAAHELGHSLGLSHSTDIGALMYPSYTFSGDVQLAQDDIDGIQAIYGRSQNPVQPRGPQTPKACDSKLTFDAITTIRGEVMFFKDRFYMRTNPFYPEVELNFISVFWPQLPNGLEAAYEFADRDEVRFFKGNKYWAVQGQNVLHGYPKDIYSSFGFPRTVKHIDAALSEENTGKTYFFVANKYWRYDEYKRSMDPGYPKMIAHDFPGIGHKVDAVFMKDGFFYFFHGTRQYKFDPKTKRILTLQKANSWFNCRKN

SEQ ID NO: 3312 - protein, 450 aa, Artificial Sequence
  MMP-1 variant I251C
FPATLETQEQDVDLVQKYLEKYYNLKNDGRQVEKRRNSGPVVEKLKQMQEFFGLKVTGKPDAETLKVMKQPRCGVPDVAQFVLTEGNPRWEQTHLTYRIENYTPDLPRADVDHAIEKAFQLWSNVTPLTFTKVSEGQADIMISFVRGDHRDNSPFDGPGGNLAHAFQPGPGIGGDAHFDEDERWTNNFREYNLHRVAAHELGHSLGLSHSTDIGALMYPSYTFSGDVQLAQDDIDGIQAIYGRSQNPVQPCGPQTPKACDSKLTFDAITTIRGEVMFFKDRFYMRTNPFYPEVELNFISVFWPQLPNGLEAAYEFADRDEVRFFKGNKYWAVQGQNVLHGYPKDIYSSFGFPRTVKHIDAALSEENTGKTYFFVANKYWRYDEYKRSMDPGYPKMIAHDFPGIGHKVDAVFMKDGFFYFFHGTRQYKFDPKTKRILTLQKANSWFNCRKN

SEQ ID NO: 3313 - protein, 450 aa, Artificial Sequence
  MMP-1 variant I251N
FPATLETQEQDVDLVQKYLEKYYNLKNDGRQVEKRRNSGPVVEKLKQMQEFFGLKVTGKPDAETLKVMKQPRCGVPDVAQFVLTEGNPRWEQTHLTYRIENYTPDLPRADVDHAIEKAFQLWSNVTPLTFTKVSEGQADIMISFVRGDHRDNSPFDGPGGNLAHAFQPGPGIGGDAHFDEDERWTNNFREYNLHRVAAHELGHSLGLSHSTDIGALMYPSYTFSGDVQLAQDDIDGIQAIYGRSQNPVQPNGPQTPKACDSKLTFDAITTIRGEVMFFKDRFYMRTNPFYPEVELNFISVFWPQLPNGLEAAYEFADRDEVRFFKGNKYWAVQGQNVLHGYPKDIYSSFGFPRTVKHIDAALSEENTGKTYFFVANKYWRYDEYKRSMDPGYPKMIAHDFPGIGHKVDAVFMKDGFFYFFHGTRQYKFDPKTKRILTLQKANSWFNCRKN

SEQ ID NO: 3314 - protein, 450 aa, Artificial Sequence
  MMP-1 variant I251Q
FPATLETQEQDVDLVQKYLEKYYNLKNDGRQVEKRRNSGPVVEKLKQMQEFFGLKVTGKPDAETLKVMKQPRCGVPDVAQFVLTEGNPRWEQTHLTYRIENYTPDLPRADVDHAIEKAFQLWSNVTPLTFTKVSEGQADIMISFVRGDHRDNSPFDGPGGNLAHAFQPGPGIGGDAHFDEDERWTNNFREYNLHRVAAHELGHSLGLSHSTDIGALMYPSYTFSGDVQLAQDDIDGIQAIYGRSQNPVQPQGPQTPKACDSKLTFDAITTIRGEVMFFKDRFYMRTNPFYPEVELNFISVFWPQLPNGLEAAYEFADRDEVRFFKGNKYWAVQGQNVLHGYPKDIYSSFGFPRTVKHIDAALSEENTGKTYFFVANKYWRYDEYKRSMDPGYPKMIAHDFPGIGHKVDAVFMKDGFFYFFHGTRQYKFDPKTKRILTLQKANSWFNCRKN

SEQ ID NO: 3315 - protein, 450 aa, Artificial Sequence
  MMP-1 variant I251T
FPATLETQEQDVDLVQKYLEKYYNLKNDGRQVEKRRNSGPVVEKLKQMQEFFGLKVTGKPDAETLKVMKQPRCGVPDVAQFVLTEGNPRWEQTHLTYRIENYTPDLPRADVDHAIEKAFQLWSNVTPLTFTKVSEGQADIMISFVRGDHRDNSPFDGPGGNLAHAFQPGPGIGGDAHFDEDERWTNNFREYNLHRVAAHELGHSLGLSHSTDIGALMYPSYTFSGDVQLAQDDIDGIQAIYGRSQNPVQPTGPQTPKACDSKLTFDAITTIRGEVMFFKDRFYMRTNPFYPEVELNFISVFWPQLPNGLEAAYEFADRDEVRFFKGNKYWAVQGQNVLHGYPKDIYSSFGFPRTVKHIDAALSEENTGKTYFFVANKYWRYDEYKRSMDPGYPKMIAHDFPGIGHKVDAVFMKDGFFYFFHGTRQYKFDPKTKRILTLQKANSWFNCRKN

SEQ ID NO: 3316 - protein, 450 aa, Artificial Sequence
  MMP-1 variant I251Y
FPATLETQEQDVDLVQKYLEKYYNLKNDGRQVEKRRNSGPVVEKLKQMQEFFGLKVTGKPDAETLKVMKQPRCGVPDVAQFVLTEGNPRWEQTHLTYRIENYTPDLPRADVDHAIEKAFQLWSNVTPLTFTKVSEGQADIMISFVRGDHRDNSPFDGPGGNLAHAFQPGPGIGGDAHFDEDERWTNNFREYNLHRVAAHELGHSLGLSHSTDIGALMYPSYTFSGDVQLAQDDIDGIQAIYGRSQNPVQPYGPQTPKACDSKLTFDAITTIRGEVMFFKDRFYMRTNPFYPEVELNFISVFWPQLPNGLEAAYEFADRDEVRFFKGNKYWAVQGQNVLHGYPKDIYSSFGFPRTVKHIDAALSEENTGKTYFFVANKYWRYDEYKRSMDPGYPKMIAHDFPGIGHKVDAVFMKDGFFYFFHGTRQYKFDPKTKRILTLQKANSWFNCRKN

SEQ ID NO: 3317 - protein, 450 aa, Artificial Sequence
  MMP-1 variant I251S
FPATLETQEQDVDLVQKYLEKYYNLKNDGRQVEKRRNSGPVVEKLKQMQEFFGLKVTGKPDAETLKVMKQPRCGVPDVAQFVLTEGNPRWEQTHLTYRIENYTPDLPRADVDHAIEKAFQLWSNVTPLTFTKVSEGQADIMISFVRGDHRDNSPFDGPGGNLAHAFQPGPGIGGDAHFDEDERWTNNFREYNLHRVAAHELGHSLGLSHSTDIGALMYPSYTFSGDVQLAQDDIDGIQAIYGRSQNPVQPSGPQTPKACDSKLTFDAITTIRGEVMFFKDRFYMRTNPFYPEVELNFISVFWPQLPNGLEAAYEFADRDEVRFFKGNKYWAVQGQNVLHGYPKDIYSSFGFPRTVKHIDAALSEENTGKTYFFVANKYWRYDEYKRSMDPGYPKMIAHDFPGIGHKVDAVFMKDGFFYFFHGTRQYKFDPKTKRILTLQKANSWFNCRKN

SEQ ID NO: 3318 - protein, 450 aa, Artificial Sequence
  MMP-1 variant I251G
FPATLETQEQDVDLVQKYLEKYYNLKNDGRQVEKRRNSGPVVEKLKQMQEFFGLKVTGKPDAETLKVMKQPRCGVPDVAQFVLTEGNPRWEQTHLTYRIENYTPDLPRADVDHAIEKAFQLWSNVTPLTFTKVSEGQADIMISFVRGDHRDNSPFDGPGGNLAHAFQPGPGIGGDAHFDEDERWTNNFREYNLHRVAAHELGHSLGLSHSTDIGALMYPSYTFSGDVQLAQDDIDGIQAIYGRSQNPVQPGGPQTPKACDSKLTFDAITTIRGEVMFFKDRFYMRTNPFYPEVELNFISVFWPQLPNGLEAAYEFADRDEVRFFKGNKYWAVQGQNVLHGYPKDIYSSFGFPRTVKHIDAALSEENTGKTYFFVANKYWRYDEYKRSMDPGYPKMIAHDFPGIGHKVDAVFMKDGFFYFFHGTRQYKFDPKTKRILTLQKANSWFNCRKN

SEQ ID NO: 3319 - protein, 450 aa, Artificial Sequence
  MMP-1 variant I251F
FPATLETQEQDVDLVQKYLEKYYNLKNDGRQVEKRRNSGPVVEKLKQMQEFFGLKVTGKPDAETLKVMKQPRCGVPDVAQFVLTEGNPRWEQTHLTYRIENYTPDLPRADVDHAIEKAFQLWSNVTPLTFTKVSEGQADIMISFVRGDHRDNSPFDGPGGNLAHAFQPGPGIGGDAHFDEDERWTNNFREYNLHRVAAHELGHSLGLSHSTDIGALMYPSYTFSGDVQLAQDDIDGIQAIYGRSQNPVQPFGPQTPKACDSKLTFDAITTIRGEVMFFKDRFYMRTNPFYPEVELNFISVFWPQLPNGLEAAYEFADRDEVRFFKGNKYWAVQGQNVLHGYPKDIYSSFGFPRTVKHIDAALSEENTGKTYFFVANKYWRYDEYKRSMDPGYPKMIAHDFPGIGHKVDAVFMKDGFFYFFHGTRQYKFDPKTKRILTLQKANSWFNCRKN

SEQ ID NO: 3320 - protein, 450 aa, Artificial Sequence
  MMP-1 variant I251M
FPATLETQEQDVDLVQKYLEKYYNLKNDGRQVEKRRNSGPVVEKLKQMQEFFGLKVTGKPDAETLKVMKQPRCGVPDVAQFVLTEGNPRWEQTHLTYRIENYTPDLPRADVDHAIEKAFQLWSNVTPLTFTKVSEGQADIMISFVRGDHRDNSPFDGPGGNLAHAFQPGPGIGGDAHFDEDERWTNNFREYNLHRVAAHELGHSLGLSHSTDIGALMYPSYTFSGDVQLAQDDIDGIQAIYGRSQNPVQPMGPQTPKACDSKLTFDAITTIRGEVMFFKDRFYMRTNPFYPEVELNFISVFWPQLPNGLEAAYEFADRDEVRFFKGNKYWAVQGQNVLHGYPKDIYSSFGFPRTVKHIDAALSEENTGKTYFFVANKYWRYDEYKRSMDPGYPKMIAHDFPGIGHKVDAVFMKDGFFYFFHGTRQYKFDPKTKRILTLQKANSWFNCRKN

SEQ ID NO: 3321 - protein, 450 aa, Artificial Sequence
  MMP-1 variant I251W
FPATLETQEQDVDLVQKYLEKYYNLKNDGRQVEKRRNSGPVVEKLKQMQEFFGLKVTGKPDAETLKVMKQPRCGVPDVAQFVLTEGNPRWEQTHLTYRIENYTPDLPRADVDHAIEKAFQLWSNVTPLTFTKVSEGQADIMISFVRGDHRDNSPFDGPGGNLAHAFQPGPGIGGDAHFDEDERWTNNFREYNLHRVAAHELGHSLGLSHSTDIGALMYPSYTFSGDVQLAQDDIDGIQAIYGRSQNPVQPWGPQTPKACDSKLTFDAITTIRGEVMFFKDRFYMRTNPFYPEVELNFISVFWPQLPNGLEAAYEFADRDEVRFFKGNKYWAVQGQNVLHGYPKDIYSSFGFPRTVKHIDAALSEENTGKTYFFVANKYWRYDEYKRSMDPGYPKMIAHDFPGIGHKVDAVFMKDGFFYFFHGTRQYKFDPKTKRILTLQKANSWFNCRKN

SEQ ID NO: 3322 - protein, 450 aa, Artificial Sequence
  MMP-1 variant I251V
FPATLETQEQDVDLVQKYLEKYYNLKNDGRQVEKRRNSGPVVEKLKQMQEFFGLKVTGKPDAETLKVMKQPRCGVPDVAQFVLTEGNPRWEQTHLTYRIENYTPDLPRADVDHAIEKAFQLWSNVTPLTFTKVSEGQADIMISFVRGDHRDNSPFDGPGGNLAHAFQPGPGIGGDAHFDEDERWTNNFREYNLHRVAAHELGHSLGLSHSTDIGALMYPSYTFSGDVQLAQDDIDGIQAIYGRSQNPVQPVGPQTPKACDSKLTFDAITTIRGEVMFFKDRFYMRTNPFYPEVELNFISVFWPQLPNGLEAAYEFADRDEVRFFKGNKYWAVQGQNVLHGYPKDIYSSFGFPRTVKHIDAALSEENTGKTYFFVANKYWRYDEYKRSMDPGYPKMIAHDFPGIGHKVDAVFMKDGFFYFFHGTRQYKFDPKTKRILTLQKANSWFNCRKN

SEQ ID NO: 3323 - protein, 450 aa, Artificial Sequence
  MMP-1 variant I251L
FPATLETQEQDVDLVQKYLEKYYNLKNDGRQVEKRRNSGPVVEKLKQMQEFFGLKVTGKPDAETLKVMKQPRCGVPDVAQFVLTEGNPRWEQTHLTYRIENYTPDLPRADVDHAIEKAFQLWSNVTPLTFTKVSEGQADIMISFVRGDHRDNSPFDGPGGNLAHAFQPGPGIGGDAHFDEDERWTNNFREYNLHRVAAHELGHSLGLSHSTDIGALMYPSYTFSGDVQLAQDDIDGIQAIYGRSQNPVQPLGPQTPKACDSKLTFDAITTIRGEVMFFKDRFYMRTNPFYPEVELNFISVFWPQLPNGLEAAYEFADRDEVRFFKGNKYWAVQGQNVLHGYPKDIYSSFGFPRTVKHIDAALSEENTGKTYFFVANKYWRYDEYKRSMDPGYPKMIAHDFPGIGHKVDAVFMKDGFFYFFHGTRQYKFDPKTKRILTLQKANSWFNCRKN

SEQ ID NO: 3324 - protein, 450 aa, Artificial Sequence
  MMP-1 variant I251A
FPATLETQEQDVDLVQKYLEKYYNLKNDGRQVEKRRNSGPVVEKLKQMQEFFGLKVTGKPDAETLKVMKQPRCGVPDVAQFVLTEGNPRWEQTHLTYRIENYTPDLPRADVDHAIEKAFQLWSNVTPLTFTKVSEGQADIMISFVRGDHRDNSPFDGPGGNLAHAFQPGPGIGGDAHFDEDERWTNNFREYNLHRVAAHELGHSLGLSHSTDIGALMYPSYTFSGDVQLAQDDIDGIQAIYGRSQNPVQPAGPQTPKACDSKLTFDAITTIRGEVMFFKDRFYMRTNPFYPEVELNFISVFWPQLPNGLEAAYEFADRDEVRFFKGNKYWAVQGQNVLHGYPKDIYSSFGFPRTVKHIDAALSEENTGKTYFFVANKYWRYDEYKRSMDPGYPKMIAHDFPGIGHKVDAVFMKDGFFYFFHGTRQYKFDPKTKRILTLQKANSWFNCRKN

SEQ ID NO: 3325 - protein, 450 aa, Artificial Sequence
  MMP-1 variant I251P
FPATLETQEQDVDLVQKYLEKYYNLKNDGRQVEKRRNSGPVVEKLKQMQEFFGLKVTGKPDAETLKVMKQPRCGVPDVAQFVLTEGNPRWEQTHLTYRIENYTPDLPRADVDHAIEKAFQLWSNVTPLTFTKVSEGQADIMISFVRGDHRDNSPFDGPGGNLAHAFQPGPGIGGDAHFDEDERWTNNFREYNLHRVAAHELGHSLGLSHSTDIGALMYPSYTFSGDVQLAQDDIDGIQAIYGRSQNPVQPPGPQTPKACDSKLTFDAITTIRGEVMFFKDRFYMRTNPFYPEVELNFISVFWPQLPNGLEAAYEFADRDEVRFFKGNKYWAVQGQNVLHGYPKDIYSSFGFPRTVKHIDAALSEENTGKTYFFVANKYWRYDEYKRSMDPGYPKMIAHDFPGIGHKVDAVFMKDGFFYFFHGTRQYKFDPKTKRILTLQKANSWFNCRKN

SEQ ID NO: 3326 - protein, 450 aa, Artificial Sequence
  MMP-1 variant G252D
FPATLETQEQDVDLVQKYLEKYYNLKNDGRQVEKRRNSGPVVEKLKQMQEFFGLKVTGKPDAETLKVMKQPRCGVPDVAQFVLTEGNPRWEQTHLTYRIENYTPDLPRADVDHAIEKAFQLWSNVTPLTFTKVSEGQADIMISFVRGDHRDNSPFDGPGGNLAHAFQPGPGIGGDAHFDEDERWTNNFREYNLHRVAAHELGHSLGLSHSTDIGALMYPSYTFSGDVQLAQDDIDGIQAIYGRSQNPVQPIDPQTPKACDSKLTFDAITTIRGEVMFFKDRFYMRTNPFYPEVELNFISVFWPQLPNGLEAAYEFADRDEVRFFKGNKYWAVQGQNVLHGYPKDIYSSFGFPRTVKHIDAALSEENTGKTYFFVANKYWRYDEYKRSMDPGYPKMIAHDFPGIGHKVDAVFMKDGFFYFFHGTRQYKFDPKTKRILTLQKANSWFNCRKN

SEQ ID NO: 3327 - protein, 450 aa, Artificial Sequence
  MMP-1 variant G252E
FPATLETQEQDVDLVQKYLEKYYNLKNDGRQVEKRRNSGPVVEKLKQMQEFFGLKVTGKPDAETLKVMKQPRCGVPDVAQFVLTEGNPRWEQTHLTYRIENYTPDLPRADVDHAIEKAFQLWSNVTPLTFTKVSEGQADIMISFVRGDHRDNSPFDGPGGNLAHAFQPGPGIGGDAHFDEDERWTNNFREYNLHRVAAHELGHSLGLSHSTDIGALMYPSYTFSGDVQLAQDDIDGIQAIYGRSQNPVQPIEPQTPKACDSKLTFDAITTIRGEVMFFKDRFYMRTNPFYPEVELNFISVFWPQLPNGLEAAYEFADRDEVRFFKGNKYWAVQGQNVLHGYPKDIYSSFGFPRTVKHIDAALSEENTGKTYFFVANKYWRYDEYKRSMDPGYPKMIAHDFPGIGHKVDAVFMKDGFFYFFHGTRQYKFDPKTKRILTLQKANSWFNCRKN

SEQ ID NO: 3328 - protein, 450 aa, Artificial Sequence; identical to SEQ ID NO: 2054
  MMP-1 variant G252H

SEQ ID NO: 3329 - protein, 450 aa, Artificial Sequence
  MMP-1 variant G252K
FPATLETQEQDVDLVQKYLEKYYNLKNDGRQVEKRRNSGPVVEKLKQMQEFFGLKVTGKPDAETLKVMKQPRCGVPDVAQFVLTEGNPRWEQTHLTYRIENYTPDLPRADVDHAIEKAFQLWSNVTPLTFTKVSEGQADIMISFVRGDHRDNSPFDGPGGNLAHAFQPGPGIGGDAHFDEDERWTNNFREYNLHRVAAHELGHSLGLSHSTDIGALMYPSYTFSGDVQLAQDDIDGIQAIYGRSQNPVQPIKPQTPKACDSKLTFDAITTIRGEVMFFKDRFYMRTNPFYPEVELNFISVFWPQLPNGLEAAYEFADRDEVRFFKGNKYWAVQGQNVLHGYPKDIYSSFGFPRTVKHIDAALSEENTGKTYFFVANKYWRYDEYKRSMDPGYPKMIAHDFPGIGHKVDAVFMKDGFFYFFHGTRQYKFDPKTKRILTLQKANSWFNCRKN

SEQ ID NO: 3330 - protein, 450 aa, Artificial Sequence
  MMP-1 variant G252R
FPATLETQEQDVDLVQKYLEKYYNLKNDGRQVEKRRNSGPVVEKLKQMQEFFGLKVTGKPDAETLKVMKQPRCGVPDVAQFVLTEGNPRWEQTHLTYRIENYTPDLPRADVDHAIEKAFQLWSNVTPLTFTKVSEGQADIMISFVRGDHRDNSPFDGPGGNLAHAFQPGPGIGGDAHFDEDERWTNNFREYNLHRVAAHELGHSLGLSHSTDIGALMYPSYTFSGDVQLAQDDIDGIQAIYGRSQNPVQPIRPQTPKACDSKLTFDAITTIRGEVMFFKDRFYMRTNPFYPEVELNFISVFWPQLPNGLEAAYEFADRDEVRFFKGNKYWAVQGQNVLHGYPKDIYSSFGFPRTVKHIDAALSEENTGKTYFFVANKYWRYDEYKRSMDPGYPKMIAHDFPGIGHKVDAVFMKDGFFYFFHGTRQYKFDPKTKRILTLQKANSWFNCRKN

SEQ ID NO: 3331 - protein, 450 aa, Artificial Sequence
  MMP-1 variant G252C
FPATLETQEQDVDLVQKYLEKYYNLKNDGRQVEKRRNSGPVVEKLKQMQEFFGLKVTGKPDAETLKVMKQPRCGVPDVAQFVLTEGNPRWEQTHLTYRIENYTPDLPRADVDHAIEKAFQLWSNVTPLTFTKVSEGQADIMISFVRGDHRDNSPFDGPGGNLAHAFQPGPGIGGDAHFDEDERWTNNFREYNLHRVAAHELGHSLGLSHSTDIGALMYPSYTFSGDVQLAQDDIDGIQAIYGRSQNPVQPICPQTPKACDSKLTFDAITTIRGEVMFFKDRFYMRTNPFYPEVELNFISVFWPQLPNGLEAAYEFADRDEVRFFKGNKYWAVQGQNVLHGYPKDIYSSFGFPRTVKHIDAALSEENTGKTYFFVANKYWRYDEYKRSMDPGYPKMIAHDFPGIGHKVDAVFMKDGFFYFFHGTRQYKFDPKTKRILTLQKANSWFNCRKN

SEQ ID NO: 3332 - protein, 450 aa, Artificial Sequence
  MMP-1 variant G252N
FPATLETQEQDVDLVQKYLEKYYNLKNDGRQVEKRRNSGPVVEKLKQMQEFFGLKVTGKPDAETLKVMKQPRCGVPDVAQFVLTEGNPRWEQTHLTYRIENYTPDLPRADVDHAIEKAFQLWSNVTPLTFTKVSEGQADIMISFVRGDHRDNSPFDGPGGNLAHAFQPGPGIGGDAHFDEDERWTNNFREYNLHRVAAHELGHSLGLSHSTDIGALMYPSYTFSGDVQLAQDDIDGIQAIYGRSQNPVQPINPQTPKACDSKLTFDAITTIRGEVMFFKDRFYMRTNPFYPEVELNFISVFWPQLPNGLEAAYEFADRDEVRFFKGNKYWAVQGQNVLHGYPKDIYSSFGFPRTVKHIDAALSEENTGKTYFFVANKYWRYDEYKRSMDPGYPKMIAHDFPGIGHKVDAVFMKDGFFYFFHGTRQYKFDPKTKRILTLQKANSWFNCRKN

SEQ ID NO: 3333 - protein, 450 aa, Artificial Sequence
  MMP-1 variant G252Q
FPATLETQEQDVDLVQKYLEKYYNLKNDGRQVEKRRNSGPVVEKLKQMQEFFGLKVTGKPDAETLKVMKQPRCGVPDVAQFVLTEGNPRWEQTHLTYRIENYTPDLPRADVDHAIEKAFQLWSNVTPLTFTKVSEGQADIMISFVRGDHRDNSPFDGPGGNLAHAFQPGPGIGGDAHFDEDERWTNNFREYNLHRVAAHELGHSLGLSHSTDIGALMYPSYTFSGDVQLAQDDIDGIQAIYGRSQNPVQPIQPQTPKACDSKLTFDAITTIRGEVMFFKDRFYMRTNPFYPEVELNFISVFWPQLPNGLEAAYEFADRDEVRFFKGNKYWAVQGQNVLHGYPKDIYSSFGFPRTVKHIDAALSEENTGKTYFFVANKYWRYDEYKRSMDPGYPKMIAHDFPGIGHKVDAVFMKDGFFYFFHGTRQYKFDPKTKRILTLQKANSWFNCRKN

SEQ ID NO: 3334 - protein, 450 aa, Artificial Sequence
  MMP-1 variant G252T
FPATLETQEQDVDLVQKYLEKYYNLKNDGRQVEKRRNSGPVVEKLKQMQEFFGLKVTGKPDAETLKVMKQPRCGVPDVAQFVLTEGNPRWEQTHLTYRIENYTPDLPRADVDHAIEKAFQLWSNVTPLTFTKVSEGQADIMISFVRGDHRDNSPFDGPGGNLAHAFQPGPGIGGDAHFDEDERWTNNFREYNLHRVAAHELGHSLGLSHSTDIGALMYPSYTFSGDVQLAQDDIDGIQAIYGRSQNPVQPITPQTPKACDSKLTFDAITTIRGEVMFFKDRFYMRTNPFYPEVELNFISVFWPQLPNGLEAAYEFADRDEVRFFKGNKYWAVQGQNVLHGYPKDIYSSFGFPRTVKHIDAALSEENTGKTYFFVANKYWRYDEYKRSMDPGYPKMIAHDFPGIGHKVDAVFMKDGFFYFFHGTRQYKFDPKTKRILTLQKANSWFNCRKN

SEQ ID NO: 3335 - protein, 450 aa, Artificial Sequence
  MMP-1 variant G252Y
FPATLETQEQDVDLVQKYLEKYYNLKNDGRQVEKRRNSGPVVEKLKQMQEFFGLKVTGKPDAETLKVMKQPRCGVPDVAQFVLTEGNPRWEQTHLTYRIENYTPDLPRADVDHAIEKAFQLWSNVTPLTFTKVSEGQADIMISFVRGDHRDNSPFDGPGGNLAHAFQPGPGIGGDAHFDEDERWTNNFREYNLHRVAAHELGHSLGLSHSTDIGALMYPSYTFSGDVQLAQDDIDGIQAIYGRSQNPVQPIYPQTPKACDSKLTFDAITTIRGEVMFFKDRFYMRTNPFYPEVELNFISVFWPQLPNGLEAAYEFADRDEVRFFKGNKYWAVQGQNVLHGYPKDIYSSFGFPRTVKHIDAALSEENTGKTYFFVANKYWRYDEYKRSMDPGYPKMIAHDFPGIGHKVDAVFMKDGFFYFFHGTRQYKFDPKTKRILTLQKANSWFNCRKN

SEQ ID NO: 3336 - protein, 450 aa, Artificial Sequence
  MMP-1 variant G252S
FPATLETQEQDVDLVQKYLEKYYNLKNDGRQVEKRRNSGPVVEKLKQMQEFFGLKVTGKPDAETLKVMKQPRCGVPDVAQFVLTEGNPRWEQTHLTYRIENYTPDLPRADVDHAIEKAFQLWSNVTPLTFTKVSEGQADIMISFVRGDHRDNSPFDGPGGNLAHAFQPGPGIGGDAHFDEDERWTNNFREYNLHRVAAHELGHSLGLSHSTDIGALMYPSYTFSGDVQLAQDDIDGIQAIYGRSQNPVQPISPQTPKACDSKLTFDAITTIRGEVMFFKDRFYMRTNPFYPEVELNFISVFWPQLPNGLEAAYEFADRDEVRFFKGNKYWAVQGQNVLHGYPKDIYSSFGFPRTVKHIDAALSEENTGKTYFFVANKYWRYDEYKRSMDPGYPKMIAHDFPGIGHKVDAVFMKDGFFYFFHGTRQYKFDPKTKRILTLQKANSWFNCRKN

SEQ ID NO: 3337 - protein, 450 aa, Artificial Sequence
  MMP-1 variant G252F
FPATLETQEQDVDLVQKYLEKYYNLKNDGRQVEKRRNSGPVVEKLKQMQEFFGLKVTGKPDAETLKVMKQPRCGVPDVAQFVLTEGNPRWEQTHLTYRIENYTPDLPRADVDHAIEKAFQLWSNVTPLTFTKVSEGQADIMISFVRGDHRDNSPFDGPGGNLAHAFQPGPGIGGDAHFDEDERWTNNFREYNLHRVAAHELGHSLGLSHSTDIGALMYPSYTFSGDVQLAQDDIDGIQAIYGRSQNPVQPIFPQTPKACDSKLTFDAITTIRGEVMFFKDRFYMRTNPFYPEVELNFISVFWPQLPNGLEAAYEFADRDEVRFFKGNKYWAVQGQNVLHGYPKDIYSSFGFPRTVKHIDAALSEENTGKTYFFVANKYWRYDEYKRSMDPGYPKMIAHDFPGIGHKVDAVFMKDGFFYFFHGTRQYKFDPKTKRILTLQKANSWFNCRKN

SEQ ID NO: 3338 - protein, 450 aa, Artificial Sequence
  MMP-1 variant G252M
FPATLETQEQDVDLVQKYLEKYYNLKNDGRQVEKRRNSGPVVEKLKQMQEFFGLKVTGKPDAETLKVMKQPRCGVPDVAQFVLTEGNPRWEQTHLTYRIENYTPDLPRADVDHAIEKAFQLWSNVTPLTFTKVSEGQADIMISFVRGDHRDNSPFDGPGGNLAHAFQPGPGIGGDAHFDEDERWTNNFREYNLHRVAAHELGHSLGLSHSTDIGALMYPSYTFSGDVQLAQDDIDGIQAIYGRSQNPVQPIMPQTPKACDSKLTFDAITTIRGEVMFFKDRFYMRTNPFYPEVELNFISVFWPQLPNGLEAAYEFADRDEVRFFKGNKYWAVQGQNVLHGYPKDIYSSFGFPRTVKHIDAALSEENTGKTYFFVANKYWRYDEYKRSMDPGYPKMIAHDFPGIGHKVDAVFMKDGFFYFFHGTRQYKFDPKTKRILTLQKANSWFNCRKN

SEQ ID NO: 3339 - protein, 450 aa, Artificial Sequence
  MMP-1 variant G252W
FPATLETQEQDVDLVQKYLEKYYNLKNDGRQVEKRRNSGPVVEKLKQMQEFFGLKVTGKPDAETLKVMKQPRCGVPDVAQFVLTEGNPRWEQTHLTYRIENYTPDLPRADVDHAIEKAFQLWSNVTPLTFTKVSEGQADIMISFVRGDHRDNSPFDGPGGNLAHAFQPGPGIGGDAHFDEDERWTNNFREYNLHRVAAHELGHSLGLSHSTDIGALMYPSYTFSGDVQLAQDDIDGIQAIYGRSQNPVQPIWPQTPKACDSKLTFDAITTIRGEVMFFKDRFYMRTNPFYPEVELNFISVFWPQLPNGLEAAYEFADRDEVRFFKGNKYWAVQGQNVLHGYPKDIYSSFGFPRTVKHIDAALSEENTGKTYFFVANKYWRYDEYKRSMDPGYPKMIAHDFPGIGHKVDAVFMKDGFFYFFHGTRQYKFDPKTKRILTLQKANSWFNCRKN

SEQ ID NO: 3340 - protein, 450 aa, Artificial Sequence
  MMP-1 variant G252I
FPATLETQEQDVDLVQKYLEKYYNLKNDGRQVEKRRNSGPVVEKLKQMQEFFGLKVTGKPDAETLKVMKQPRCGVPDVAQFVLTEGNPRWEQTHLTYRIENYTPDLPRADVDHAIEKAFQLWSNVTPLTFTKVSEGQADIMISFVRGDHRDNSPFDGPGGNLAHAFQPGPGIGGDAHFDEDERWTNNFREYNLHRVAAHELGHSLGLSHSTDIGALMYPSYTFSGDVQLAQDDIDGIQAIYGRSQNPVQPIIPQTPKACDSKLTFDAITTIRGEVMFFKDRFYMRTNPFYPEVELNFISVFWPQLPNGLEAAYEFADRDEVRFFKGNKYWAVQGQNVLHGYPKDIYSSFGFPRTVKHIDAALSEENTGKTYFFVANKYWRYDEYKRSMDPGYPKMIAHDFPGIGHKVDAVFMKDGFFYFFHGTRQYKFDPKTKRILTLQKANSWFNCRKN

SEQ ID NO: 3341 - protein, 450 aa, Artificial Sequence
  MMP-1 variant G252V
FPATLETQEQDVDLVQKYLEKYYNLKNDGRQVEKRRNSGPVVEKLKQMQEFFGLKVTGKPDAETLKVMKQPRCGVPDVAQFVLTEGNPRWEQTHLTYRIENYTPDLPRADVDHAIEKAFQLWSNVTPLTFTKVSEGQADIMISFVRGDHRDNSPFDGPGGNLAHAFQPGPGIGGDAHFDEDERWTNNFREYNLHRVAAHELGHSLGLSHSTDIGALMYPSYTFSGDVQLAQDDIDGIQAIYGRSQNPVQPIVPQTPKACDSKLTFDAITTIRGEVMFFKDRFYMRTNPFYPEVELNFISVFWPQLPNGLEAAYEFADRDEVRFFKGNKYWAVQGQNVLHGYPKDIYSSFGFPRTVKHIDAALSEENTGKTYFFVANKYWRYDEYKRSMDPGYPKMIAHDFPGIGHKVDAVFMKDGFFYFFHGTRQYKFDPKTKRILTLQKANSWFNCRKN

SEQ ID NO: 3342 - protein, 450 aa, Artificial Sequence
  MMP-1 variant G252L
FPATLETQEQDVDLVQKYLEKYYNLKNDGRQVEKRRNSGPVVEKLKQMQEFFGLKVTGKPDAETLKVMKQPRCGVPDVAQFVLTEGNPRWEQTHLTYRIENYTPDLPRADVDHAIEKAFQLWSNVTPLTFTKVSEGQADIMISFVRGDHRDNSPFDGPGGNLAHAFQPGPGIGGDAHFDEDERWTNNFREYNLHRVAAHELGHSLGLSHSTDIGALMYPSYTFSGDVQLAQDDIDGIQAIYGRSQNPVQPILPQTPKACDSKLTFDAITTIRGEVMFFKDRFYMRTNPFYPEVELNFISVFWPQLPNGLEAAYEFADRDEVRFFKGNKYWAVQGQNVLHGYPKDIYSSFGFPRTVKHIDAALSEENTGKTYFFVANKYWRYDEYKRSMDPGYPKMIAHDFPGIGHKVDAVFMKDGFFYFFHGTRQYKFDPKTKRILTLQKANSWFNCRKN

SEQ ID NO: 3343 - protein, 450 aa, Artificial Sequence
  MMP-1 variant G252A
FPATLETQEQDVDLVQKYLEKYYNLKNDGRQVEKRRNSGPVVEKLKQMQEFFGLKVTGKPDAETLKVMKQPRCGVPDVAQFVLTEGNPRWEQTHLTYRIENYTPDLPRADVDHAIEKAFQLWSNVTPLTFTKVSEGQADIMISFVRGDHRDNSPFDGPGGNLAHAFQPGPGIGGDAHFDEDERWTNNFREYNLHRVAAHELGHSLGLSHSTDIGALMYPSYTFSGDVQLAQDDIDGIQAIYGRSQNPVQPIAPQTPKACDSKLTFDAITTIRGEVMFFKDRFYMRTNPFYPEVELNFISVFWPQLPNGLEAAYEFADRDEVRFFKGNKYWAVQGQNVLHGYPKDIYSSFGFPRTVKHIDAALSEENTGKTYFFVANKYWRYDEYKRSMDPGYPKMIAHDFPGIGHKVDAVFMKDGFFYFFHGTRQYKFDPKTKRILTLQKANSWFNCRKN

SEQ ID NO: 3344 - protein, 450 aa, Artificial Sequence
  MMP-1 variant G252P
FPATLETQEQDVDLVQKYLEKYYNLKNDGRQVEKRRNSGPVVEKLKQMQEFFGLKVTGKPDAETLKVMKQPRCGVPDVAQFVLTEGNPRWEQTHLTYRIENYTPDLPRADVDHAIEKAFQLWSNVTPLTFTKVSEGQADIMISFVRGDHRDNSPFDGPGGNLAHAFQPGPGIGGDAHFDEDERWTNNFREYNLHRVAAHELGHSLGLSHSTDIGALMYPSYTFSGDVQLAQDDIDGIQAIYGRSQNPVQPIPPQTPKACDSKLTFDAITTIRGEVMFFKDRFYMRTNPFYPEVELNFISVFWPQLPNGLEAAYEFADRDEVRFFKGNKYWAVQGQNVLHGYPKDIYSSFGFPRTVKHIDAALSEENTGKTYFFVANKYWRYDEYKRSMDPGYPKMIAHDFPGIGHKVDAVFMKDGFFYFFHGTRQYKFDPKTKRILTLQKANSWFNCRKN

SEQ ID NO: 3345 - protein, 450 aa, Artificial Sequence
  MMP-1 variant P253D
FPATLETQEQDVDLVQKYLEKYYNLKNDGRQVEKRRNSGPVVEKLKQMQEFFGLKVTGKPDAETLKVMKQPRCGVPDVAQFVLTEGNPRWEQTHLTYRIENYTPDLPRADVDHAIEKAFQLWSNVTPLTFTKVSEGQADIMISFVRGDHRDNSPFDGPGGNLAHAFQPGPGIGGDAHFDEDERWTNNFREYNLHRVAAHELGHSLGLSHSTDIGALMYPSYTFSGDVQLAQDDIDGIQAIYGRSQNPVQPIGDQTPKACDSKLTFDAITTIRGEVMFFKDRFYMRTNPFYPEVELNFISVFWPQLPNGLEAAYEFADRDEVRFFKGNKYWAVQGQNVLHGYPKDIYSSFGFPRTVKHIDAALSEENTGKTYFFVANKYWRYDEYKRSMDPGYPKMIAHDFPGIGHKVDAVFMKDGFFYFFHGTRQYKFDPKTKRILTLQKANSWFNCRKN

SEQ ID NO: 3346 - protein, 450 aa, Artificial Sequence
  MMP-1 variant P253E
FPATLETQEQDVDLVQKYLEKYYNLKNDGRQVEKRRNSGPVVEKLKQMQEFFGLKVTGKPDAETLKVMKQPRCGVPDVAQFVLTEGNPRWEQTHLTYRIENYTPDLPRADVDHAIEKAFQLWSNVTPLTFTKVSEGQADIMISFVRGDHRDNSPFDGPGGNLAHAFQPGPGIGGDAHFDEDERWTNNFREYNLHRVAAHELGHSLGLSHSTDIGALMYPSYTFSGDVQLAQDDIDGIQAIYGRSQNPVQPIGEQTPKACDSKLTFDAITTIRGEVMFFKDRFYMRTNPFYPEVELNFISVFWPQLPNGLEAAYEFADRDEVRFFKGNKYWAVQGQNVLHGYPKDIYSSFGFPRTVKHIDAALSEENTGKTYFFVANKYWRYDEYKRSMDPGYPKMIAHDFPGIGHKVDAVFMKDGFFYFFHGTRQYKFDPKTKRILTLQKANSWFNCRKN

SEQ ID NO: 3347 - protein, 450 aa, Artificial Sequence
  MMP-1 variant P253H
FPATLETQEQDVDLVQKYLEKYYNLKNDGRQVEKRRNSGPVVEKLKQMQEFFGLKVTGKPDAETLKVMKQPRCGVPDVAQFVLTEGNPRWEQTHLTYRIENYTPDLPRADVDHAIEKAFQLWSNVTPLTFTKVSEGQADIMISFVRGDHRDNSPFDGPGGNLAHAFQPGPGIGGDAHFDEDERWTNNFREYNLHRVAAHELGHSLGLSHSTDIGALMYPSYTFSGDVQLAQDDIDGIQAIYGRSQNPVQPIGHQTPKACDSKLTFDAITTIRGEVMFFKDRFYMRTNPFYPEVELNFISVFWPQLPNGLEAAYEFADRDEVRFFKGNKYWAVQGQNVLHGYPKDIYSSFGFPRTVKHIDAALSEENTGKTYFFVANKYWRYDEYKRSMDPGYPKMIAHDFPGIGHKVDAVFMKDGFFYFFHGTRQYKFDPKTKRILTLQKANSWFNCRKN

SEQ ID NO: 3348 - protein, 450 aa, Artificial Sequence
  MMP-1 variant P253K
FPATLETQEQDVDLVQKYLEKYYNLKNDGRQVEKRRNSGPVVEKLKQMQEFFGLKVTGKPDAETLKVMKQPRCGVPDVAQFVLTEGNPRWEQTHLTYRIENYTPDLPRADVDHAIEKAFQLWSNVTPLTFTKVSEGQADIMISFVRGDHRDNSPFDGPGGNLAHAFQPGPGIGGDAHFDEDERWTNNFREYNLHRVAAHELGHSLGLSHSTDIGALMYPSYTFSGDVQLAQDDIDGIQAIYGRSQNPVQPIGKQTPKACDSKLTFDAITTIRGEVMFFKDRFYMRTNPFYPEVELNFISVFWPQLPNGLEAAYEFADRDEVRFFKGNKYWAVQGQNVLHGYPKDIYSSFGFPRTVKHIDAALSEENTGKTYFFVANKYWRYDEYKRSMDPGYPKMIAHDFPGIGHKVDAVFMKDGFFYFFHGTRQYKFDPKTKRILTLQKANSWFNCRKN

SEQ ID NO: 3349 - protein, 450 aa, Artificial Sequence
  MMP-1 variant P253R
FPATLETQEQDVDLVQKYLEKYYNLKNDGRQVEKRRNSGPVVEKLKQMQEFFGLKVTGKPDAETLKVMKQPRCGVPDVAQFVLTEGNPRWEQTHLTYRIENYTPDLPRADVDHAIEKAFQLWSNVTPLTFTKVSEGQADIMISFVRGDHRDNSPFDGPGGNLAHAFQPGPGIGGDAHFDEDERWTNNFREYNLHRVAAHELGHSLGLSHSTDIGALMYPSYTFSGDVQLAQDDIDGIQAIYGRSQNPVQPIGRQTPKACDSKLTFDAITTIRGEVMFFKDRFYMRTNPFYPEVELNFISVFWPQLPNGLEAAYEFADRDEVRFFKGNKYWAVQGQNVLHGYPKDIYSSFGFPRTVKHIDAALSEENTGKTYFFVANKYWRYDEYKRSMDPGYPKMIAHDFPGIGHKVDAVFMKDGFFYFFHGTRQYKFDPKTKRILTLQKANSWFNCRKN

SEQ ID NO: 3350 - protein, 450 aa, Artificial Sequence
  MMP-1 variant P253C
FPATLETQEQDVDLVQKYLEKYYNLKNDGRQVEKRRNSGPVVEKLKQMQEFFGLKVTGKPDAETLKVMKQPRCGVPDVAQFVLTEGNPRWEQTHLTYRIENYTPDLPRADVDHAIEKAFQLWSNVTPLTFTKVSEGQADIMISFVRGDHRDNSPFDGPGGNLAHAFQPGPGIGGDAHFDEDERWTNNFREYNLHRVAAHELGHSLGLSHSTDIGALMYPSYTFSGDVQLAQDDIDGIQAIYGRSQNPVQPIGCQTPKACDSKLTFDAITTIRGEVMFFKDRFYMRTNPFYPEVELNFISVFWPQLPNGLEAAYEFADRDEVRFFKGNKYWAVQGQNVLHGYPKDIYSSFGFPRTVKHIDAALSEENTGKTYFFVANKYWRYDEYKRSMDPGYPKMIAHDFPGIGHKVDAVFMKDGFFYFFHGTRQYKFDPKTKRILTLQKANSWFNCRKN

SEQ ID NO: 3351 - protein, 450 aa, Artificial Sequence
  MMP-1 variant P253N
FPATLETQEQDVDLVQKYLEKYYNLKNDGRQVEKRRNSGPVVEKLKQMQEFFGLKVTGKPDAETLKVMKQPRCGVPDVAQFVLTEGNPRWEQTHLTYRIENYTPDLPRADVDHAIEKAFQLWSNVTPLTFTKVSEGQADIMISFVRGDHRDNSPFDGPGGNLAHAFQPGPGIGGDAHFDEDERWTNNFREYNLHRVAAHELGHSLGLSHSTDIGALMYPSYTFSGDVQLAQDDIDGIQAIYGRSQNPVQPIGNQTPKACDSKLTFDAITTIRGEVMFFKDRFYMRTNPFYPEVELNFISVFWPQLPNGLEAAYEFADRDEVRFFKGNKYWAVQGQNVLHGYPKDIYSSFGFPRTVKHIDAALSEENTGKTYFFVANKYWRYDEYKRSMDPGYPKMIAHDFPGIGHKVDAVFMKDGFFYFFHGTRQYKFDPKTKRILTLQKANSWFNCRKN

SEQ ID NO: 3352 - protein, 450 aa, Artificial Sequence
  MMP-1 variant P253Q
FPATLETQEQDVDLVQKYLEKYYNLKNDGRQVEKRRNSGPVVEKLKQMQEFFGLKVTGKPDAETLKVMKQPRCGVPDVAQFVLTEGNPRWEQTHLTYRIENYTPDLPRADVDHAIEKAFQLWSNVTPLTFTKVSEGQADIMISFVRGDHRDNSPFDGPGGNLAHAFQPGPGIGGDAHFDEDERWTNNFREYNLHRVAAHELGHSLGLSHSTDIGALMYPSYTFSGDVQLAQDDIDGIQAIYGRSQNPVQPIGQQTPKACDSKLTFDAITTIRGEVMFFKDRFYMRTNPFYPEVELNFISVFWPQLPNGLEAAYEFADRDEVRFFKGNKYWAVQGQNVLHGYPKDIYSSFGFPRTVKHIDAALSEENTGKTYFFVANKYWRYDEYKRSMDPGYPKMIAHDFPGIGHKVDAVFMKDGFFYFFHGTRQYKFDPKTKRILTLQKANSWFNCRKN

SEQ ID NO: 3353 - protein, 450 aa, Artificial Sequence
  MMP-1 variant P253T
FPATLETQEQDVDLVQKYLEKYYNLKNDGRQVEKRRNSGPVVEKLKQMQEFFGLKVTGKPDAETLKVMKQPRCGVPDVAQFVLTEGNPRWEQTHLTYRIENYTPDLPRADVDHAIEKAFQLWSNVTPLTFTKVSEGQADIMISFVRGDHRDNSPFDGPGGNLAHAFQPGPGIGGDAHFDEDERWTNNFREYNLHRVAAHELGHSLGLSHSTDIGALMYPSYTFSGDVQLAQDDIDGIQAIYGRSQNPVQPIGTQTPKACDSKLTFDAITTIRGEVMFFKDRFYMRTNPFYPEVELNFISVFWPQLPNGLEAAYEFADRDEVRFFKGNKYWAVQGQNVLHGYPKDIYSSFGFPRTVKHIDAALSEENTGKTYFFVANKYWRYDEYKRSMDPGYPKMIAHDFPGIGHKVDAVFMKDGFFYFFHGTRQYKFDPKTKRILTLQKANSWFNCRKN

SEQ ID NO: 3354 - protein, 450 aa, Artificial Sequence
  MMP-1 variant P253Y
FPATLETQEQDVDLVQKYLEKYYNLKNDGRQVEKRRNSGPVVEKLKQMQEFFGLKVTGKPDAETLKVMKQPRCGVPDVAQFVLTEGNPRWEQTHLTYRIENYTPDLPRADVDHAIEKAFQLWSNVTPLTFTKVSEGQADIMISFVRGDHRDNSPFDGPGGNLAHAFQPGPGIGGDAHFDEDERWTNNFREYNLHRVAAHELGHSLGLSHSTDIGALMYPSYTFSGDVQLAQDDIDGIQAIYGRSQNPVQPIGYQTPKACDSKLTFDAITTIRGEVMFFKDRFYMRTNPFYPEVELNFISVFWPQLPNGLEAAYEFADRDEVRFFKGNKYWAVQGQNVLHGYPKDIYSSFGFPRTVKHIDAALSEENTGKTYFFVANKYWRYDEYKRSMDPGYPKMIAHDFPGIGHKVDAVFMKDGFFYFFHGTRQYKFDPKTKRILTLQKANSWFNCRKN

SEQ ID NO: 3355 - protein, 450 aa, Artificial Sequence
  MMP-1 variant P253S
FPATLETQEQDVDLVQKYLEKYYNLKNDGRQVEKRRNSGPVVEKLKQMQEFFGLKVTGKPDAETLKVMKQPRCGVPDVAQFVLTEGNPRWEQTHLTYRIENYTPDLPRADVDHAIEKAFQLWSNVTPLTFTKVSEGQADIMISFVRGDHRDNSPFDGPGGNLAHAFQPGPGIGGDAHFDEDERWTNNFREYNLHRVAAHELGHSLGLSHSTDIGALMYPSYTFSGDVQLAQDDIDGIQAIYGRSQNPVQPIGSQTPKACDSKLTFDAITTIRGEVMFFKDRFYMRTNPFYPEVELNFISVFWPQLPNGLEAAYEFADRDEVRFFKGNKYWAVQGQNVLHGYPKDIYSSFGFPRTVKHIDAALSEENTGKTYFFVANKYWRYDEYKRSMDPGYPKMIAHDFPGIGHKVDAVFMKDGFFYFFHGTRQYKFDPKTKRILTLQKANSWFNCRKN

SEQ ID NO: 3356 - protein, 450 aa, Artificial Sequence
  MMP-1 variant P253G
FPATLETQEQDVDLVQKYLEKYYNLKNDGRQVEKRRNSGPVVEKLKQMQEFFGLKVTGKPDAETLKVMKQPRCGVPDVAQFVLTEGNPRWEQTHLTYRIENYTPDLPRADVDHAIEKAFQLWSNVTPLTFTKVSEGQADIMISFVRGDHRDNSPFDGPGGNLAHAFQPGPGIGGDAHFDEDERWTNNFREYNLHRVAAHELGHSLGLSHSTDIGALMYPSYTFSGDVQLAQDDIDGIQAIYGRSQNPVQPIGGQTPKACDSKLTFDAITTIRGEVMFFKDRFYMRTNPFYPEVELNFISVFWPQLPNGLEAAYEFADRDEVRFFKGNKYWAVQGQNVLHGYPKDIYSSFGFPRTVKHIDAALSEENTGKTYFFVANKYWRYDEYKRSMDPGYPKMIAHDFPGIGHKVDAVFMKDGFFYFFHGTRQYKFDPKTKRILTLQKANSWFNCRKN

SEQ ID NO: 3357 - protein, 450 aa, Artificial Sequence
  MMP-1 variant P253F
FPATLETQEQDVDLVQKYLEKYYNLKNDGRQVEKRRNSGPVVEKLKQMQEFFGLKVTGKPDAETLKVMKQPRCGVPDVAQFVLTEGNPRWEQTHLTYRIENYTPDLPRADVDHAIEKAFQLWSNVTPLTFTKVSEGQADIMISFVRGDHRDNSPFDGPGGNLAHAFQPGPGIGGDAHFDEDERWTNNFREYNLHRVAAHELGHSLGLSHSTDIGALMYPSYTFSGDVQLAQDDIDGIQAIYGRSQNPVQPIGFQTPKACDSKLTFDAITTIRGEVMFFKDRFYMRTNPFYPEVELNFISVFWPQLPNGLEAAYEFADRDEVRFFKGNKYWAVQGQNVLHGYPKDIYSSFGFPRTVKHIDAALSEENTGKTYFFVANKYWRYDEYKRSMDPGYPKMIAHDFPGIGHKVDAVFMKDGFFYFFHGTRQYKFDPKTKRILTLQKANSWFNCRKN

SEQ ID NO: 3358 - protein, 450 aa, Artificial Sequence
  MMP-1 variant P253M
FPATLETQEQDVDLVQKYLEKYYNLKNDGRQVEKRRNSGPVVEKLKQMQEFFGLKVTGKPDAETLKVMKQPRCGVPDVAQFVLTEGNPRWEQTHLTYRIENYTPDLPRADVDHAIEKAFQLWSNVTPLTFTKVSEGQADIMISFVRGDHRDNSPFDGPGGNLAHAFQPGPGIGGDAHFDEDERWTNNFREYNLHRVAAHELGHSLGLSHSTDIGALMYPSYTFSGDVQLAQDDIDGIQAIYGRSQNPVQPIGMQTPKACDSKLTFDAITTIRGEVMFFKDRFYMRTNPFYPEVELNFISVFWPQLPNGLEAAYEFADRDEVRFFKGNKYWAVQGQNVLHGYPKDIYSSFGFPRTVKHIDAALSEENTGKTYFFVANKYWRYDEYKRSMDPGYPKMIAHDFPGIGHKVDAVFMKDGFFYFFHGTRQYKFDPKTKRILTLQKANSWFNCRKN

SEQ ID NO: 3359 - protein, 450 aa, Artificial Sequence
  MMP-1 variant P253W
FPATLETQEQDVDLVQKYLEKYYNLKNDGRQVEKRRNSGPVVEKLKQMQEFFGLKVTGKPDAETLKVMKQPRCGVPDVAQFVLTEGNPRWEQTHLTYRIENYTPDLPRADVDHAIEKAFQLWSNVTPLTFTKVSEGQADIMISFVRGDHRDNSPFDGPGGNLAHAFQPGPGIGGDAHFDEDERWTNNFREYNLHRVAAHELGHSLGLSHSTDIGALMYPSYTFSGDVQLAQDDIDGIQAIYGRSQNPVQPIGWQTPKACDSKLTFDAITTIRGEVMFFKDRFYMRTNPFYPEVELNFISVFWPQLPNGLEAAYEFADRDEVRFFKGNKYWAVQGQNVLHGYPKDIYSSFGFPRTVKHIDAALSEENTGKTYFFVANKYWRYDEYKRSMDPGYPKMIAHDFPGIGHKVDAVFMKDGFFYFFHGTRQYKFDPKTKRILTLQKANSWFNCRKN

SEQ ID NO: 3360 - protein, 450 aa, Artificial Sequence
  MMP-1 variant P253I
FPATLETQEQDVDLVQKYLEKYYNLKNDGRQVEKRRNSGPVVEKLKQMQEFFGLKVTGKPDAETLKVMKQPRCGVPDVAQFVLTEGNPRWEQTHLTYRIENYTPDLPRADVDHAIEKAFQLWSNVTPLTFTKVSEGQADIMISFVRGDHRDNSPFDGPGGNLAHAFQPGPGIGGDAHFDEDERWTNNFREYNLHRVAAHELGHSLGLSHSTDIGALMYPSYTFSGDVQLAQDDIDGIQAIYGRSQNPVQPIGIQTPKACDSKLTFDAITTIRGEVMFFKDRFYMRTNPFYPEVELNFISVFWPQLPNGLEAAYEFADRDEVRFFKGNKYWAVQGQNVLHGYPKDIYSSFGFPRTVKHIDAALSEENTGKTYFFVANKYWRYDEYKRSMDPGYPKMIAHDFPGIGHKVDAVFMKDGFFYFFHGTRQYKFDPKTKRILTLQKANSWFNCRKN

SEQ ID NO: 3361 - protein, 450 aa, Artificial Sequence
  MMP-1 variant P253V
FPATLETQEQDVDLVQKYLEKYYNLKNDGRQVEKRRNSGPVVEKLKQMQEFFGLKVTGKPDAETLKVMKQPRCGVPDVAQFVLTEGNPRWEQTHLTYRIENYTPDLPRADVDHAIEKAFQLWSNVTPLTFTKVSEGQADIMISFVRGDHRDNSPFDGPGGNLAHAFQPGPGIGGDAHFDEDERWTNNFREYNLHRVAAHELGHSLGLSHSTDIGALMYPSYTFSGDVQLAQDDIDGIQAIYGRSQNPVQPIGVQTPKACDSKLTFDAITTIRGEVMFFKDRFYMRTNPFYPEVELNFISVFWPQLPNGLEAAYEFADRDEVRFFKGNKYWAVQGQNVLHGYPKDIYSSFGFPRTVKHIDAALSEENTGKTYFFVANKYWRYDEYKRSMDPGYPKMIAHDFPGIGHKVDAVFMKDGFFYFFHGTRQYKFDPKTKRILTLQKANSWFNCRKN

SEQ ID NO: 3362 - protein, 450 aa, Artificial Sequence
  MMP-1 variant P253L
FPATLETQEQDVDLVQKYLEKYYNLKNDGRQVEKRRNSGPVVEKLKQMQEFFGLKVTGKPDAETLKVMKQPRCGVPDVAQFVLTEGNPRWEQTHLTYRIENYTPDLPRADVDHAIEKAFQLWSNVTPLTFTKVSEGQADIMISFVRGDHRDNSPFDGPGGNLAHAFQPGPGIGGDAHFDEDERWTNNFREYNLHRVAAHELGHSLGLSHSTDIGALMYPSYTFSGDVQLAQDDIDGIQAIYGRSQNPVQPIGLQTPKACDSKLTFDAITTIRGEVMFFKDRFYMRTNPFYPEVELNFISVFWPQLPNGLEAAYEFADRDEVRFFKGNKYWAVQGQNVLHGYPKDIYSSFGFPRTVKHIDAALSEENTGKTYFFVANKYWRYDEYKRSMDPGYPKMIAHDFPGIGHKVDAVFMKDGFFYFFHGTRQYKFDPKTKRILTLQKANSWFNCRKN

SEQ ID NO: 3363 - protein, 450 aa, Artificial Sequence
  MMP-1 variant P253A
FPATLETQEQDVDLVQKYLEKYYNLKNDGRQVEKRRNSGPVVEKLKQMQEFFGLKVTGKPDAETLKVMKQPRCGVPDVAQFVLTEGNPRWEQTHLTYRIENYTPDLPRADVDHAIEKAFQLWSNVTPLTFTKVSEGQADIMISFVRGDHRDNSPFDGPGGNLAHAFQPGPGIGGDAHFDEDERWTNNFREYNLHRVAAHELGHSLGLSHSTDIGALMYPSYTFSGDVQLAQDDIDGIQAIYGRSQNPVQPIGAQTPKACDSKLTFDAITTIRGEVMFFKDRFYMRTNPFYPEVELNFISVFWPQLPNGLEAAYEFADRDEVRFFKGNKYWAVQGQNVLHGYPKDIYSSFGFPRTVKHIDAALSEENTGKTYFFVANKYWRYDEYKRSMDPGYPKMIAHDFPGIGHKVDAVFMKDGFFYFFHGTRQYKFDPKTKRILTLQKANSWFNCRKN

SEQ ID NO: 3364 - protein, 450 aa, Artificial Sequence
  MMP-1 variant Q254D
FPATLETQEQDVDLVQKYLEKYYNLKNDGRQVEKRRNSGPVVEKLKQMQEFFGLKVTGKPDAETLKVMKQPRCGVPDVAQFVLTEGNPRWEQTHLTYRIENYTPDLPRADVDHAIEKAFQLWSNVTPLTFTKVSEGQADIMISFVRGDHRDNSPFDGPGGNLAHAFQPGPGIGGDAHFDEDERWTNNFREYNLHRVAAHELGHSLGLSHSTDIGALMYPSYTFSGDVQLAQDDIDGIQAIYGRSQNPVQPIGPDTPKACDSKLTFDAITTIRGEVMFFKDRFYMRTNPFYPEVELNFISVFWPQLPNGLEAAYEFADRDEVRFFKGNKYWAVQGQNVLHGYPKDIYSSFGFPRTVKHIDAALSEENTGKTYFFVANKYWRYDEYKRSMDPGYPKMIAHDFPGIGHKVDAVFMKDGFFYFFHGTRQYKFDPKTKRILTLQKANSWFNCRKN

SEQ ID NO: 3365 - protein, 450 aa, Artificial Sequence
  MMP-1 variant Q254E
FPATLETQEQDVDLVQKYLEKYYNLKNDGRQVEKRRNSGPVVEKLKQMQEFFGLKVTGKPDAETLKVMKQPRCGVPDVAQFVLTEGNPRWEQTHLTYRIENYTPDLPRADVDHAIEKAFQLWSNVTPLTFTKVSEGQADIMISFVRGDHRDNSPFDGPGGNLAHAFQPGPGIGGDAHFDEDERWTNNFREYNLHRVAAHELGHSLGLSHSTDIGALMYPSYTFSGDVQLAQDDIDGIQAIYGRSQNPVQPIGPETPKACDSKLTFDAITTIRGEVMFFKDRFYMRTNPFYPEVELNFISVFWPQLPNGLEAAYEFADRDEVRFFKGNKYWAVQGQNVLHGYPKDIYSSFGFPRTVKHIDAALSEENTGKTYFFVANKYWRYDEYKRSMDPGYPKMIAHDFPGIGHKVDAVFMKDGFFYFFHGTRQYKFDPKTKRILTLQKANSWFNCRKN

SEQ ID NO: 3366 - protein, 450 aa, Artificial Sequence
  MMP-1 variant Q254H
FPATLETQEQDVDLVQKYLEKYYNLKNDGRQVEKRRNSGPVVEKLKQMQEFFGLKVTGKPDAETLKVMKQPRCGVPDVAQFVLTEGNPRWEQTHLTYRIENYTPDLPRADVDHAIEKAFQLWSNVTPLTFTKVSEGQADIMISFVRGDHRDNSPFDGPGGNLAHAFQPGPGIGGDAHFDEDERWTNNFREYNLHRVAAHELGHSLGLSHSTDIGALMYPSYTFSGDVQLAQDDIDGIQAIYGRSQNPVQPIGPHTPKACDSKLTFDAITTIRGEVMFFKDRFYMRTNPFYPEVELNFISVFWPQLPNGLEAAYEFADRDEVRFFKGNKYWAVQGQNVLHGYPKDIYSSFGFPRTVKHIDAALSEENTGKTYFFVANKYWRYDEYKRSMDPGYPKMIAHDFPGIGHKVDAVFMKDGFFYFFHGTRQYKFDPKTKRILTLQKANSWFNCRKN

SEQ ID NO: 3367 - protein, 450 aa, Artificial Sequence
  MMP-1 variant Q254K
FPATLETQEQDVDLVQKYLEKYYNLKNDGRQVEKRRNSGPVVEKLKQMQEFFGLKVTGKPDAETLKVMKQPRCGVPDVAQFVLTEGNPRWEQTHLTYRIENYTPDLPRADVDHAIEKAFQLWSNVTPLTFTKVSEGQADIMISFVRGDHRDNSPFDGPGGNLAHAFQPGPGIGGDAHFDEDERWTNNFREYNLHRVAAHELGHSLGLSHSTDIGALMYPSYTFSGDVQLAQDDIDGIQAIYGRSQNPVQPIGPKTPKACDSKLTFDAITTIRGEVMFFKDRFYMRTNPFYPEVELNFISVFWPQLPNGLEAAYEFADRDEVRFFKGNKYWAVQGQNVLHGYPKDIYSSFGFPRTVKHIDAALSEENTGKTYFFVANKYWRYDEYKRSMDPGYPKMIAHDFPGIGHKVDAVFMKDGFFYFFHGTRQYKFDPKTKRILTLQKANSWFNCRKN

SEQ ID NO: 3368 - protein, 450 aa, Artificial Sequence
  MMP-1 variant Q254R
FPATLETQEQDVDLVQKYLEKYYNLKNDGRQVEKRRNSGPVVEKLKQMQEFFGLKVTGKPDAETLKVMKQPRCGVPDVAQFVLTEGNPRWEQTHLTYRIENYTPDLPRADVDHAIEKAFQLWSNVTPLTFTKVSEGQADIMISFVRGDHRDNSPFDGPGGNLAHAFQPGPGIGGDAHFDEDERWTNNFREYNLHRVAAHELGHSLGLSHSTDIGALMYPSYTFSGDVQLAQDDIDGIQAIYGRSQNPVQPIGPRTPKACDSKLTFDAITTIRGEVMFFKDRFYMRTNPFYPEVELNFISVFWPQLPNGLEAAYEFADRDEVRFFKGNKYWAVQGQNVLHGYPKDIYSSFGFPRTVKHIDAALSEENTGKTYFFVANKYWRYDEYKRSMDPGYPKMIAHDFPGIGHKVDAVFMKDGFFYFFHGTRQYKFDPKTKRILTLQKANSWFNCRKN

SEQ ID NO: 3369 - protein, 450 aa, Artificial Sequence
  MMP-1 variant Q254C
FPATLETQEQDVDLVQKYLEKYYNLKNDGRQVEKRRNSGPVVEKLKQMQEFFGLKVTGKPDAETLKVMKQPRCGVPDVAQFVLTEGNPRWEQTHLTYRIENYTPDLPRADVDHAIEKAFQLWSNVTPLTFTKVSEGQADIMISFVRGDHRDNSPFDGPGGNLAHAFQPGPGIGGDAHFDEDERWTNNFREYNLHRVAAHELGHSLGLSHSTDIGALMYPSYTFSGDVQLAQDDIDGIQAIYGRSQNPVQPIGPCTPKACDSKLTFDAITTIRGEVMFFKDRFYMRTNPFYPEVELNFISVFWPQLPNGLEAAYEFADRDEVRFFKGNKYWAVQGQNVLHGYPKDIYSSFGFPRTVKHIDAALSEENTGKTYFFVANKYWRYDEYKRSMDPGYPKMIAHDFPGIGHKVDAVFMKDGFFYFFHGTRQYKFDPKTKRILTLQKANSWFNCRKN

SEQ ID NO: 3370 - protein, 450 aa, Artificial Sequence
  MMP-1 variant Q254N
FPATLETQEQDVDLVQKYLEKYYNLKNDGRQVEKRRNSGPVVEKLKQMQEFFGLKVTGKPDAETLKVMKQPRCGVPDVAQFVLTEGNPRWEQTHLTYRIENYTPDLPRADVDHAIEKAFQLWSNVTPLTFTKVSEGQADIMISFVRGDHRDNSPFDGPGGNLAHAFQPGPGIGGDAHFDEDERWTNNFREYNLHRVAAHELGHSLGLSHSTDIGALMYPSYTFSGDVQLAQDDIDGIQAIYGRSQNPVQPIGPNTPKACDSKLTFDAITTIRGEVMFFKDRFYMRTNPFYPEVELNFISVFWPQLPNGLEAAYEFADRDEVRFFKGNKYWAVQGQNVLHGYPKDIYSSFGFPRTVKHIDAALSEENTGKTYFFVANKYWRYDEYKRSMDPGYPKMIAHDFPGIGHKVDAVFMKDGFFYFFHGTRQYKFDPKTKRILTLQKANSWFNCRKN

SEQ ID NO: 3371 - protein, 450 aa, Artificial Sequence
  MMP-1 variant Q254T
FPATLETQEQDVDLVQKYLEKYYNLKNDGRQVEKRRNSGPVVEKLKQMQEFFGLKVTGKPDAETLKVMKQPRCGVPDVAQFVLTEGNPRWEQTHLTYRIENYTPDLPRADVDHAIEKAFQLWSNVTPLTFTKVSEGQADIMISFVRGDHRDNSPFDGPGGNLAHAFQPGPGIGGDAHFDEDERWTNNFREYNLHRVAAHELGHSLGLSHSTDIGALMYPSYTFSGDVQLAQDDIDGIQAIYGRSQNPVQPIGPTTPKACDSKLTFDAITTIRGEVMFFKDRFYMRTNPFYPEVELNFISVFWPQLPNGLEAAYEFADRDEVRFFKGNKYWAVQGQNVLHGYPKDIYSSFGFPRTVKHIDAALSEENTGKTYFFVANKYWRYDEYKRSMDPGYPKMIAHDFPGIGHKVDAVFMKDGFFYFFHGTRQYKFDPKTKRILTLQKANSWFNCRKN

SEQ ID NO: 3372 - protein, 450 aa, Artificial Sequence
  MMP-1 variant Q254Y
FPATLETQEQDVDLVQKYLEKYYNLKNDGRQVEKRRNSGPVVEKLKQMQEFFGLKVTGKPDAETLKVMKQPRCGVPDVAQFVLTEGNPRWEQTHLTYRIENYTPDLPRADVDHAIEKAFQLWSNVTPLTFTKVSEGQADIMISFVRGDHRDNSPFDGPGGNLAHAFQPGPGIGGDAHFDEDERWTNNFREYNLHRVAAHELGHSLGLSHSTDIGALMYPSYTFSGDVQLAQDDIDGIQAIYGRSQNPVQPIGPYTPKACDSKLTFDAITTIRGEVMFFKDRFYMRTNPFYPEVELNFISVFWPQLPNGLEAAYEFADRDEVRFFKGNKYWAVQGQNVLHGYPKDIYSSFGFPRTVKHIDAALSEENTGKTYFFVANKYWRYDEYKRSMDPGYPKMIAHDFPGIGHKVDAVFMKDGFFYFFHGTRQYKFDPKTKRILTLQKANSWFNCRKN

SEQ ID NO: 3373 - protein, 450 aa, Artificial Sequence
  MMP-1 variant Q254S
FPATLETQEQDVDLVQKYLEKYYNLKNDGRQVEKRRNSGPVVEKLKQMQEFFGLKVTGKPDAETLKVMKQPRCGVPDVAQFVLTEGNPRWEQTHLTYRIENYTPDLPRADVDHAIEKAFQLWSNVTPLTFTKVSEGQADIMISFVRGDHRDNSPFDGPGGNLAHAFQPGPGIGGDAHFDEDERWTNNFREYNLHRVAAHELGHSLGLSHSTDIGALMYPSYTFSGDVQLAQDDIDGIQAIYGRSQNPVQPIGPSTPKACDSKLTFDAITTIRGEVMFFKDRFYMRTNPFYPEVELNFISVFWPQLPNGLEAAYEFADRDEVRFFKGNKYWAVQGQNVLHGYPKDIYSSFGFPRTVKHIDAALSEENTGKTYFFVANKYWRYDEYKRSMDPGYPKMIAHDFPGIGHKVDAVFMKDGFFYFFHGTRQYKFDPKTKRILTLQKANSWFNCRKN

SEQ ID NO: 3374 - protein, 450 aa, Artificial Sequence
  MMP-1 variant Q254G
FPATLETQEQDVDLVQKYLEKYYNLKNDGRQVEKRRNSGPVVEKLKQMQEFFGLKVTGKPDAETLKVMKQPRCGVPDVAQFVLTEGNPRWEQTHLTYRIENYTPDLPRADVDHAIEKAFQLWSNVTPLTFTKVSEGQADIMISFVRGDHRDNSPFDGPGGNLAHAFQPGPGIGGDAHFDEDERWTNNFREYNLHRVAAHELGHSLGLSHSTDIGALMYPSYTFSGDVQLAQDDIDGIQAIYGRSQNPVQPIGPGTPKACDSKLTFDAITTIRGEVMFFKDRFYMRTNPFYPEVELNFISVFWPQLPNGLEAAYEFADRDEVRFFKGNKYWAVQGQNVLHGYPKDIYSSFGFPRTVKHIDAALSEENTGKTYFFVANKYWRYDEYKRSMDPGYPKMIAHDFPGIGHKVDAVFMKDGFFYFFHGTRQYKFDPKTKRILTLQKANSWFNCRKN

SEQ ID NO: 3375 - protein, 450 aa, Artificial Sequence
  MMP-1 variant Q254F
FPATLETQEQDVDLVQKYLEKYYNLKNDGRQVEKRRNSGPVVEKLKQMQEFFGLKVTGKPDAETLKVMKQPRCGVPDVAQFVLTEGNPRWEQTHLTYRIENYTPDLPRADVDHAIEKAFQLWSNVTPLTFTKVSEGQADIMISFVRGDHRDNSPFDGPGGNLAHAFQPGPGIGGDAHFDEDERWTNNFREYNLHRVAAHELGHSLGLSHSTDIGALMYPSYTFSGDVQLAQDDIDGIQAIYGRSQNPVQPIGPFTPKACDSKLTFDAITTIRGEVMFFKDRFYMRTNPFYPEVELNFISVFWPQLPNGLEAAYEFADRDEVRFFKGNKYWAVQGQNVLHGYPKDIYSSFGFPRTVKHIDAALSEENTGKTYFFVANKYWRYDEYKRSMDPGYPKMIAHDFPGIGHKVDAVFMKDGFFYFFHGTRQYKFDPKTKRILTLQKANSWFNCRKN

SEQ ID NO: 3376 - protein, 450 aa, Artificial Sequence
  MMP-1 variant Q254M
FPATLETQEQDVDLVQKYLEKYYNLKNDGRQVEKRRNSGPVVEKLKQMQEFFGLKVTGKPDAETLKVMKQPRCGVPDVAQFVLTEGNPRWEQTHLTYRIENYTPDLPRADVDHAIEKAFQLWSNVTPLTFTKVSEGQADIMISFVRGDHRDNSPFDGPGGNLAHAFQPGPGIGGDAHFDEDERWTNNFREYNLHRVAAHELGHSLGLSHSTDIGALMYPSYTFSGDVQLAQDDIDGIQAIYGRSQNPVQPIGPMTPKACDSKLTFDAITTIRGEVMFFKDRFYMRTNPFYPEVELNFISVFWPQLPNGLEAAYEFADRDEVRFFKGNKYWAVQGQNVLHGYPKDIYSSFGFPRTVKHIDAALSEENTGKTYFFVANKYWRYDEYKRSMDPGYPKMIAHDFPGIGHKVDAVFMKDGFFYFFHGTRQYKFDPKTKRILTLQKANSWFNCRKN

SEQ ID NO: 3377 - protein, 450 aa, Artificial Sequence
  MMP-1 variant Q254W
FPATLETQEQDVDLVQKYLEKYYNLKNDGRQVEKRRNSGPVVEKLKQMQEFFGLKVTGKPDAETLKVMKQPRCGVPDVAQFVLTEGNPRWEQTHLTYRIENYTPDLPRADVDHAIEKAFQLWSNVTPLTFTKVSEGQADIMISFVRGDHRDNSPFDGPGGNLAHAFQPGPGIGGDAHFDEDERWTNNFREYNLHRVAAHELGHSLGLSHSTDIGALMYPSYTFSGDVQLAQDDIDGIQAIYGRSQNPVQPIGPWTPKACDSKLTFDAITTIRGEVMFFKDRFYMRTNPFYPEVELNFISVFWPQLPNGLEAAYEFADRDEVRFFKGNKYWAVQGQNVLHGYPKDIYSSFGFPRTVKHIDAALSEENTGKTYFFVANKYWRYDEYKRSMDPGYPKMIAHDFPGIGHKVDAVFMKDGFFYFFHGTRQYKFDPKTKRILTLQKANSWFNCRKN

SEQ ID NO: 3378 - protein, 450 aa, Artificial Sequence
  MMP-1 variant Q254I
FPATLETQEQDVDLVQKYLEKYYNLKNDGRQVEKRRNSGPVVEKLKQMQEFFGLKVTGKPDAETLKVMKQPRCGVPDVAQFVLTEGNPRWEQTHLTYRIENYTPDLPRADVDHAIEKAFQLWSNVTPLTFTKVSEGQADIMISFVRGDHRDNSPFDGPGGNLAHAFQPGPGIGGDAHFDEDERWTNNFREYNLHRVAAHELGHSLGLSHSTDIGALMYPSYTFSGDVQLAQDDIDGIQAIYGRSQNPVQPIGPITPKACDSKLTFDAITTIRGEVMFFKDRFYMRTNPFYPEVELNFISVFWPQLPNGLEAAYEFADRDEVRFFKGNKYWAVQGQNVLHGYPKDIYSSFGFPRTVKHIDAALSEENTGKTYFFVANKYWRYDEYKRSMDPGYPKMIAHDFPGIGHKVDAVFMKDGFFYFFHGTRQYKFDPKTKRILTLQKANSWFNCRKN

SEQ ID NO: 3379 - protein, 450 aa, Artificial Sequence
  MMP-1 variant Q254V
FPATLETQEQDVDLVQKYLEKYYNLKNDGRQVEKRRNSGPVVEKLKQMQEFFGLKVTGKPDAETLKVMKQPRCGVPDVAQFVLTEGNPRWEQTHLTYRIENYTPDLPRADVDHAIEKAFQLWSNVTPLTFTKVSEGQADIMISFVRGDHRDNSPFDGPGGNLAHAFQPGPGIGGDAHFDEDERWTNNFREYNLHRVAAHELGHSLGLSHSTDIGALMYPSYTFSGDVQLAQDDIDGIQAIYGRSQNPVQPIGPVTPKACDSKLTFDAITTIRGEVMFFKDRFYMRTNPFYPEVELNFISVFWPQLPNGLEAAYEFADRDEVRFFKGNKYWAVQGQNVLHGYPKDIYSSFGFPRTVKHIDAALSEENTGKTYFFVANKYWRYDEYKRSMDPGYPKMIAHDFPGIGHKVDAVFMKDGFFYFFHGTRQYKFDPKTKRILTLQKANSWFNCRKN

SEQ ID NO: 3380 - protein, 450 aa, Artificial Sequence
  MMP-1 variant Q254L
FPATLETQEQDVDLVQKYLEKYYNLKNDGRQVEKRRNSGPVVEKLKQMQEFFGLKVTGKPDAETLKVMKQPRCGVPDVAQFVLTEGNPRWEQTHLTYRIENYTPDLPRADVDHAIEKAFQLWSNVTPLTFTKVSEGQADIMISFVRGDHRDNSPFDGPGGNLAHAFQPGPGIGGDAHFDEDERWTNNFREYNLHRVAAHELGHSLGLSHSTDIGALMYPSYTFSGDVQLAQDDIDGIQAIYGRSQNPVQPIGPLTPKACDSKLTFDAITTIRGEVMFFKDRFYMRTNPFYPEVELNFISVFWPQLPNGLEAAYEFADRDEVRFFKGNKYWAVQGQNVLHGYPKDIYSSFGFPRTVKHIDAALSEENTGKTYFFVANKYWRYDEYKRSMDPGYPKMIAHDFPGIGHKVDAVFMKDGFFYFFHGTRQYKFDPKTKRILTLQKANSWFNCRKN

SEQ ID NO: 3381 - protein, 450 aa, Artificial Sequence
  MMP-1 variant Q254A
FPATLETQEQDVDLVQKYLEKYYNLKNDGRQVEKRRNSGPVVEKLKQMQEFFGLKVTGKPDAETLKVMKQPRCGVPDVAQFVLTEGNPRWEQTHLTYRIENYTPDLPRADVDHAIEKAFQLWSNVTPLTFTKVSEGQADIMISFVRGDHRDNSPFDGPGGNLAHAFQPGPGIGGDAHFDEDERWTNNFREYNLHRVAAHELGHSLGLSHSTDIGALMYPSYTFSGDVQLAQDDIDGIQAIYGRSQNPVQPIGPATPKACDSKLTFDAITTIRGEVMFFKDRFYMRTNPFYPEVELNFISVFWPQLPNGLEAAYEFADRDEVRFFKGNKYWAVQGQNVLHGYPKDIYSSFGFPRTVKHIDAALSEENTGKTYFFVANKYWRYDEYKRSMDPGYPKMIAHDFPGIGHKVDAVFMKDGFFYFFHGTRQYKFDPKTKRILTLQKANSWFNCRKN

SEQ ID NO: 3382 - protein, 450 aa, Artificial Sequence
  MMP-1 variant Q254P
FPATLETQEQDVDLVQKYLEKYYNLKNDGRQVEKRRNSGPVVEKLKQMQEFFGLKVTGKPDAETLKVMKQPRCGVPDVAQFVLTEGNPRWEQTHLTYRIENYTPDLPRADVDHAIEKAFQLWSNVTPLTFTKVSEGQADIMISFVRGDHRDNSPFDGPGGNLAHAFQPGPGIGGDAHFDEDERWTNNFREYNLHRVAAHELGHSLGLSHSTDIGALMYPSYTFSGDVQLAQDDIDGIQAIYGRSQNPVQPIGPPTPKACDSKLTFDAITTIRGEVMFFKDRFYMRTNPFYPEVELNFISVFWPQLPNGLEAAYEFADRDEVRFFKGNKYWAVQGQNVLHGYPKDIYSSFGFPRTVKHIDAALSEENTGKTYFFVANKYWRYDEYKRSMDPGYPKMIAHDFPGIGHKVDAVFMKDGFFYFFHGTRQYKFDPKTKRILTLQKANSWFNCRKN

SEQ ID NO: 3383 - protein, 450 aa, Artificial Sequence
  MMP-1 variant T255D
FPATLETQEQDVDLVQKYLEKYYNLKNDGRQVEKRRNSGPVVEKLKQMQEFFGLKVTGKPDAETLKVMKQPRCGVPDVAQFVLTEGNPRWEQTHLTYRIENYTPDLPRADVDHAIEKAFQLWSNVTPLTFTKVSEGQADIMISFVRGDHRDNSPFDGPGGNLAHAFQPGPGIGGDAHFDEDERWTNNFREYNLHRVAAHELGHSLGLSHSTDIGALMYPSYTFSGDVQLAQDDIDGIQAIYGRSQNPVQPIGPQDPKACDSKLTFDAITTIRGEVMFFKDRFYMRTNPFYPEVELNFISVFWPQLPNGLEAAYEFADRDEVRFFKGNKYWAVQGQNVLHGYPKDIYSSFGFPRTVKHIDAALSEENTGKTYFFVANKYWRYDEYKRSMDPGYPKMIAHDFPGIGHKVDAVFMKDGFFYFFHGTRQYKFDPKTKRILTLQKANSWFNCRKN

SEQ ID NO: 3384 - protein, 450 aa, Artificial Sequence
  MMP-1 variant T255E
FPATLETQEQDVDLVQKYLEKYYNLKNDGRQVEKRRNSGPVVEKLKQMQEFFGLKVTGKPDAETLKVMKQPRCGVPDVAQFVLTEGNPRWEQTHLTYRIENYTPDLPRADVDHAIEKAFQLWSNVTPLTFTKVSEGQADIMISFVRGDHRDNSPFDGPGGNLAHAFQPGPGIGGDAHFDEDERWTNNFREYNLHRVAAHELGHSLGLSHSTDIGALMYPSYTFSGDVQLAQDDIDGIQAIYGRSQNPVQPIGPQEPKACDSKLTFDAITTIRGEVMFFKDRFYMRTNPFYPEVELNFISVFWPQLPNGLEAAYEFADRDEVRFFKGNKYWAVQGQNVLHGYPKDIYSSFGFPRTVKHIDAALSEENTGKTYFFVANKYWRYDEYKRSMDPGYPKMIAHDFPGIGHKVDAVFMKDGFFYFFHGTRQYKFDPKTKRILTLQKANSWFNCRKN

SEQ ID NO: 3385 - protein, 450 aa, Artificial Sequence
  MMP-1 variant T255H
FPATLETQEQDVDLVQKYLEKYYNLKNDGRQVEKRRNSGPVVEKLKQMQEFFGLKVTGKPDAETLKVMKQPRCGVPDVAQFVLTEGNPRWEQTHLTYRIENYTPDLPRADVDHAIEKAFQLWSNVTPLTFTKVSEGQADIMISFVRGDHRDNSPFDGPGGNLAHAFQPGPGIGGDAHFDEDERWTNNFREYNLHRVAAHELGHSLGLSHSTDIGALMYPSYTFSGDVQLAQDDIDGIQAIYGRSQNPVQPIGPQHPKACDSKLTFDAITTIRGEVMFFKDRFYMRTNPFYPEVELNFISVFWPQLPNGLEAAYEFADRDEVRFFKGNKYWAVQGQNVLHGYPKDIYSSFGFPRTVKHIDAALSEENTGKTYFFVANKYWRYDEYKRSMDPGYPKMIAHDFPGIGHKVDAVFMKDGFFYFFHGTRQYKFDPKTKRILTLQKANSWFNCRKN

SEQ ID NO: 3386 - protein, 450 aa, Artificial Sequence
  MMP-1 variant T255K
FPATLETQEQDVDLVQKYLEKYYNLKNDGRQVEKRRNSGPVVEKLKQMQEFFGLKVTGKPDAETLKVMKQPRCGVPDVAQFVLTEGNPRWEQTHLTYRIENYTPDLPRADVDHAIEKAFQLWSNVTPLTFTKVSEGQADIMISFVRGDHRDNSPFDGPGGNLAHAFQPGPGIGGDAHFDEDERWTNNFREYNLHRVAAHELGHSLGLSHSTDIGALMYPSYTFSGDVQLAQDDIDGIQAIYGRSQNPVQPIGPQKPKACDSKLTFDAITTIRGEVMFFKDRFYMRTNPFYPEVELNFISVFWPQLPNGLEAAYEFADRDEVRFFKGNKYWAVQGQNVLHGYPKDIYSSFGFPRTVKHIDAALSEENTGKTYFFVANKYWRYDEYKRSMDPGYPKMIAHDFPGIGHKVDAVFMKDGFFYFFHGTRQYKFDPKTKRILTLQKANSWFNCRKN

SEQ ID NO: 3387 - protein, 450 aa, Artificial Sequence
  MMP-1 variant T255R
FPATLETQEQDVDLVQKYLEKYYNLKNDGRQVEKRRNSGPVVEKLKQMQEFFGLKVTGKPDAETLKVMKQPRCGVPDVAQFVLTEGNPRWEQTHLTYRIENYTPDLPRADVDHAIEKAFQLWSNVTPLTFTKVSEGQADIMISFVRGDHRDNSPFDGPGGNLAHAFQPGPGIGGDAHFDEDERWTNNFREYNLHRVAAHELGHSLGLSHSTDIGALMYPSYTFSGDVQLAQDDIDGIQAIYGRSQNPVQPIGPQRPKACDSKLTFDAITTIRGEVMFFKDRFYMRTNPFYPEVELNFISVFWPQLPNGLEAAYEFADRDEVRFFKGNKYWAVQGQNVLHGYPKDIYSSFGFPRTVKHIDAALSEENTGKTYFFVANKYWRYDEYKRSMDPGYPKMIAHDFPGIGHKVDAVFMKDGFFYFFHGTRQYKFDPKTKRILTLQKANSWFNCRKN

SEQ ID NO: 3388 - protein, 450 aa, Artificial Sequence
  MMP-1 variant T255C
FPATLETQEQDVDLVQKYLEKYYNLKNDGRQVEKRRNSGPVVEKLKQMQEFFGLKVTGKPDAETLKVMKQPRCGVPDVAQFVLTEGNPRWEQTHLTYRIENYTPDLPRADVDHAIEKAFQLWSNVTPLTFTKVSEGQADIMISFVRGDHRDNSPFDGPGGNLAHAFQPGPGIGGDAHFDEDERWTNNFREYNLHRVAAHELGHSLGLSHSTDIGALMYPSYTFSGDVQLAQDDIDGIQAIYGRSQNPVQPIGPQCPKACDSKLTFDAITTIRGEVMFFKDRFYMRTNPFYPEVELNFISVFWPQLPNGLEAAYEFADRDEVRFFKGNKYWAVQGQNVLHGYPKDIYSSFGFPRTVKHIDAALSEENTGKTYFFVANKYWRYDEYKRSMDPGYPKMIAHDFPGIGHKVDAVFMKDGFFYFFHGTRQYKFDPKTKRILTLQKANSWFNCRKN

SEQ ID NO: 3389 - protein, 450 aa, Artificial Sequence
  MMP-1 variant T255N
FPATLETQEQDVDLVQKYLEKYYNLKNDGRQVEKRRNSGPVVEKLKQMQEFFGLKVTGKPDAETLKVMKQPRCGVPDVAQFVLTEGNPRWEQTHLTYRIENYTPDLPRADVDHAIEKAFQLWSNVTPLTFTKVSEGQADIMISFVRGDHRDNSPFDGPGGNLAHAFQPGPGIGGDAHFDEDERWTNNFREYNLHRVAAHELGHSLGLSHSTDIGALMYPSYTFSGDVQLAQDDIDGIQAIYGRSQNPVQPIGPQNPKACDSKLTFDAITTIRGEVMFFKDRFYMRTNPFYPEVELNFISVFWPQLPNGLEAAYEFADRDEVRFFKGNKYWAVQGQNVLHGYPKDIYSSFGFPRTVKHIDAALSEENTGKTYFFVANKYWRYDEYKRSMDPGYPKMIAHDFPGIGHKVDAVFMKDGFFYFFHGTRQYKFDPKTKRILTLQKANSWFNCRKN

SEQ ID NO: 3390 - protein, 450 aa, Artificial Sequence
  MMP-1 variant T255Q
FPATLETQEQDVDLVQKYLEKYYNLKNDGRQVEKRRNSGPVVEKLKQMQEFFGLKVTGKPDAETLKVMKQPRCGVPDVAQFVLTEGNPRWEQTHLTYRIENYTPDLPRADVDHAIEKAFQLWSNVTPLTFTKVSEGQADIMISFVRGDHRDNSPFDGPGGNLAHAFQPGPGIGGDAHFDEDERWTNNFREYNLHRVAAHELGHSLGLSHSTDIGALMYPSYTFSGDVQLAQDDIDGIQAIYGRSQNPVQPIGPQQPKACDSKLTFDAITTIRGEVMFFKDRFYMRTNPFYPEVELNFISVFWPQLPNGLEAAYEFADRDEVRFFKGNKYWAVQGQNVLHGYPKDIYSSFGFPRTVKHIDAALSEENTGKTYFFVANKYWRYDEYKRSMDPGYPKMIAHDFPGIGHKVDAVFMKDGFFYFFHGTRQYKFDPKTKRILTLQKANSWFNCRKN

SEQ ID NO: 3391 - protein, 450 aa, Artificial Sequence
  MMP-1 variant T255Y
FPATLETQEQDVDLVQKYLEKYYNLKNDGRQVEKRRNSGPVVEKLKQMQEFFGLKVTGKPDAETLKVMKQPRCGVPDVAQFVLTEGNPRWEQTHLTYRIENYTPDLPRADVDHAIEKAFQLWSNVTPLTFTKVSEGQADIMISFVRGDHRDNSPFDGPGGNLAHAFQPGPGIGGDAHFDEDERWTNNFREYNLHRVAAHELGHSLGLSHSTDIGALMYPSYTFSGDVQLAQDDIDGIQAIYGRSQNPVQPIGPQYPKACDSKLTFDAITTIRGEVMFFKDRFYMRTNPFYPEVELNFISVFWPQLPNGLEAAYEFADRDEVRFFKGNKYWAVQGQNVLHGYPKDIYSSFGFPRTVKHIDAALSEENTGKTYFFVANKYWRYDEYKRSMDPGYPKMIAHDFPGIGHKVDAVFMKDGFFYFFHGTRQYKFDPKTKRILTLQKANSWFNCRKN

SEQ ID NO: 3392 - protein, 450 aa, Artificial Sequence
  MMP-1 variant T255S
FPATLETQEQDVDLVQKYLEKYYNLKNDGRQVEKRRNSGPVVEKLKQMQEFFGLKVTGKPDAETLKVMKQPRCGVPDVAQFVLTEGNPRWEQTHLTYRIENYTPDLPRADVDHAIEKAFQLWSNVTPLTFTKVSEGQADIMISFVRGDHRDNSPFDGPGGNLAHAFQPGPGIGGDAHFDEDERWTNNFREYNLHRVAAHELGHSLGLSHSTDIGALMYPSYTFSGDVQLAQDDIDGIQAIYGRSQNPVQPIGPQSPKACDSKLTFDAITTIRGEVMFFKDRFYMRTNPFYPEVELNFISVFWPQLPNGLEAAYEFADRDEVRFFKGNKYWAVQGQNVLHGYPKDIYSSFGFPRTVKHIDAALSEENTGKTYFFVANKYWRYDEYKRSMDPGYPKMIAHDFPGIGHKVDAVFMKDGFFYFFHGTRQYKFDPKTKRILTLQKANSWFNCRKN

SEQ ID NO: 3393 - protein, 450 aa, Artificial Sequence
  MMP-1 variant T255G
FPATLETQEQDVDLVQKYLEKYYNLKNDGRQVEKRRNSGPVVEKLKQMQEFFGLKVTGKPDAETLKVMKQPRCGVPDVAQFVLTEGNPRWEQTHLTYRIENYTPDLPRADVDHAIEKAFQLWSNVTPLTFTKVSEGQADIMISFVRGDHRDNSPFDGPGGNLAHAFQPGPGIGGDAHFDEDERWTNNFREYNLHRVAAHELGHSLGLSHSTDIGALMYPSYTFSGDVQLAQDDIDGIQAIYGRSQNPVQPIGPQGPKACDSKLTFDAITTIRGEVMFFKDRFYMRTNPFYPEVELNFISVFWPQLPNGLEAAYEFADRDEVRFFKGNKYWAVQGQNVLHGYPKDIYSSFGFPRTVKHIDAALSEENTGKTYFFVANKYWRYDEYKRSMDPGYPKMIAHDFPGIGHKVDAVFMKDGFFYFFHGTRQYKFDPKTKRILTLQKANSWFNCRKN

SEQ ID NO: 3394 - protein, 450 aa, Artificial Sequence
  MMP-1 variant T255F
FPATLETQEQDVDLVQKYLEKYYNLKNDGRQVEKRRNSGPVVEKLKQMQEFFGLKVTGKPDAETLKVMKQPRCGVPDVAQFVLTEGNPRWEQTHLTYRIENYTPDLPRADVDHAIEKAFQLWSNVTPLTFTKVSEGQADIMISFVRGDHRDNSPFDGPGGNLAHAFQPGPGIGGDAHFDEDERWTNNFREYNLHRVAAHELGHSLGLSHSTDIGALMYPSYTFSGDVQLAQDDIDGIQAIYGRSQNPVQPIGPQFPKACDSKLTFDAITTIRGEVMFFKDRFYMRTNPFYPEVELNFISVFWPQLPNGLEAAYEFADRDEVRFFKGNKYWAVQGQNVLHGYPKDIYSSFGFPRTVKHIDAALSEENTGKTYFFVANKYWRYDEYKRSMDPGYPKMIAHDFPGIGHKVDAVFMKDGFFYFFHGTRQYKFDPKTKRILTLQKANSWFNCRKN

SEQ ID NO: 3395 - protein, 450 aa, Artificial Sequence
  MMP-1 variant T255M
FPATLETQEQDVDLVQKYLEKYYNLKNDGRQVEKRRNSGPVVEKLKQMQEFFGLKVTGKPDAETLKVMKQPRCGVPDVAQFVLTEGNPRWEQTHLTYRIENYTPDLPRADVDHAIEKAFQLWSNVTPLTFTKVSEGQADIMISFVRGDHRDNSPFDGPGGNLAHAFQPGPGIGGDAHFDEDERWTNNFREYNLHRVAAHELGHSLGLSHSTDIGALMYPSYTFSGDVQLAQDDIDGIQAIYGRSQNPVQPIGPQMPKACDSKLTFDAITTIRGEVMFFKDRFYMRTNPFYPEVELNFISVFWPQLPNGLEAAYEFADRDEVRFFKGNKYWAVQGQNVLHGYPKDIYSSFGFPRTVKHIDAALSEENTGKTYFFVANKYWRYDEYKRSMDPGYPKMIAHDFPGIGHKVDAVFMKDGFFYFFHGTRQYKFDPKTKRILTLQKANSWFNCRKN

SEQ ID NO: 3396 - protein, 450 aa, Artificial Sequence
  MMP-1 variant T255W
FPATLETQEQDVDLVQKYLEKYYNLKNDGRQVEKRRNSGPVVEKLKQMQEFFGLKVTGKPDAETLKVMKQPRCGVPDVAQFVLTEGNPRWEQTHLTYRIENYTPDLPRADVDHAIEKAFQLWSNVTPLTFTKVSEGQADIMISFVRGDHRDNSPFDGPGGNLAHAFQPGPGIGGDAHFDEDERWTNNFREYNLHRVAAHELGHSLGLSHSTDIGALMYPSYTFSGDVQLAQDDIDGIQAIYGRSQNPVQPIGPQWPKACDSKLTFDAITTIRGEVMFFKDRFYMRTNPFYPEVELNFISVFWPQLPNGLEAAYEFADRDEVRFFKGNKYWAVQGQNVLHGYPKDIYSSFGFPRTVKHIDAALSEENTGKTYFFVANKYWRYDEYKRSMDPGYPKMIAHDFPGIGHKVDAVFMKDGFFYFFHGTRQYKFDPKTKRILTLQKANSWFNCRKN

SEQ ID NO: 3397 - protein, 450 aa, Artificial Sequence
  MMP-1 variant T255I
FPATLETQEQDVDLVQKYLEKYYNLKNDGRQVEKRRNSGPVVEKLKQMQEFFGLKVTGKPDAETLKVMKQPRCGVPDVAQFVLTEGNPRWEQTHLTYRIENYTPDLPRADVDHAIEKAFQLWSNVTPLTFTKVSEGQADIMISFVRGDHRDNSPFDGPGGNLAHAFQPGPGIGGDAHFDEDERWTNNFREYNLHRVAAHELGHSLGLSHSTDIGALMYPSYTFSGDVQLAQDDIDGIQAIYGRSQNPVQPIGPQIPKACDSKLTFDAITTIRGEVMFFKDRFYMRTNPFYPEVELNFISVFWPQLPNGLEAAYEFADRDEVRFFKGNKYWAVQGQNVLHGYPKDIYSSFGFPRTVKHIDAALSEENTGKTYFFVANKYWRYDEYKRSMDPGYPKMIAHDFPGIGHKVDAVFMKDGFFYFFHGTRQYKFDPKTKRILTLQKANSWFNCRKN

SEQ ID NO: 3398 - protein, 450 aa, Artificial Sequence
  MMP-1 variant T255V
FPATLETQEQDVDLVQKYLEKYYNLKNDGRQVEKRRNSGPVVEKLKQMQEFFGLKVTGKPDAETLKVMKQPRCGVPDVAQFVLTEGNPRWEQTHLTYRIENYTPDLPRADVDHAIEKAFQLWSNVTPLTFTKVSEGQADIMISFVRGDHRDNSPFDGPGGNLAHAFQPGPGIGGDAHFDEDERWTNNFREYNLHRVAAHELGHSLGLSHSTDIGALMYPSYTFSGDVQLAQDDIDGIQAIYGRSQNPVQPIGPQVPKACDSKLTFDAITTIRGEVMFFKDRFYMRTNPFYPEVELNFISVFWPQLPNGLEAAYEFADRDEVRFFKGNKYWAVQGQNVLHGYPKDIYSSFGFPRTVKHIDAALSEENTGKTYFFVANKYWRYDEYKRSMDPGYPKMIAHDFPGIGHKVDAVFMKDGFFYFFHGTRQYKFDPKTKRILTLQKANSWFNCRKN

SEQ ID NO: 3399 - protein, 450 aa, Artificial Sequence
  MMP-1 variant T255L
FPATLETQEQDVDLVQKYLEKYYNLKNDGRQVEKRRNSGPVVEKLKQMQEFFGLKVTGKPDAETLKVMKQPRCGVPDVAQFVLTEGNPRWEQTHLTYRIENYTPDLPRADVDHAIEKAFQLWSNVTPLTFTKVSEGQADIMISFVRGDHRDNSPFDGPGGNLAHAFQPGPGIGGDAHFDEDERWTNNFREYNLHRVAAHELGHSLGLSHSTDIGALMYPSYTFSGDVQLAQDDIDGIQAIYGRSQNPVQPIGPQLPKACDSKLTFDAITTIRGEVMFFKDRFYMRTNPFYPEVELNFISVFWPQLPNGLEAAYEFADRDEVRFFKGNKYWAVQGQNVLHGYPKDIYSSFGFPRTVKHIDAALSEENTGKTYFFVANKYWRYDEYKRSMDPGYPKMIAHDFPGIGHKVDAVFMKDGFFYFFHGTRQYKFDPKTKRILTLQKANSWFNCRKN

SEQ ID NO: 3400 - protein, 450 aa, Artificial Sequence
  MMP-1 variant T255A
FPATLETQEQDVDLVQKYLEKYYNLKNDGRQVEKRRNSGPVVEKLKQMQEFFGLKVTGKPDAETLKVMKQPRCGVPDVAQFVLTEGNPRWEQTHLTYRIENYTPDLPRADVDHAIEKAFQLWSNVTPLTFTKVSEGQADIMISFVRGDHRDNSPFDGPGGNLAHAFQPGPGIGGDAHFDEDERWTNNFREYNLHRVAAHELGHSLGLSHSTDIGALMYPSYTFSGDVQLAQDDIDGIQAIYGRSQNPVQPIGPQAPKACDSKLTFDAITTIRGEVMFFKDRFYMRTNPFYPEVELNFISVFWPQLPNGLEAAYEFADRDEVRFFKGNKYWAVQGQNVLHGYPKDIYSSFGFPRTVKHIDAALSEENTGKTYFFVANKYWRYDEYKRSMDPGYPKMIAHDFPGIGHKVDAVFMKDGFFYFFHGTRQYKFDPKTKRILTLQKANSWFNCRKN

SEQ ID NO: 3401 - protein, 450 aa, Artificial Sequence
  MMP-1 variant T255P
FPATLETQEQDVDLVQKYLEKYYNLKNDGRQVEKRRNSGPVVEKLKQMQEFFGLKVTGKPDAETLKVMKQPRCGVPDVAQFVLTEGNPRWEQTHLTYRIENYTPDLPRADVDHAIEKAFQLWSNVTPLTFTKVSEGQADIMISFVRGDHRDNSPFDGPGGNLAHAFQPGPGIGGDAHFDEDERWTNNFREYNLHRVAAHELGHSLGLSHSTDIGALMYPSYTFSGDVQLAQDDIDGIQAIYGRSQNPVQPIGPQPPKACDSKLTFDAITTIRGEVMFFKDRFYMRTNPFYPEVELNFISVFWPQLPNGLEAAYEFADRDEVRFFKGNKYWAVQGQNVLHGYPKDIYSSFGFPRTVKHIDAALSEENTGKTYFFVANKYWRYDEYKRSMDPGYPKMIAHDFPGIGHKVDAVFMKDGFFYFFHGTRQYKFDPKTKRILTLQKANSWFNCRKN

SEQ ID NO: 3402 - protein, 450 aa, Artificial Sequence
  MMP-1 variant P256D
FPATLETQEQDVDLVQKYLEKYYNLKNDGRQVEKRRNSGPVVEKLKQMQEFFGLKVTGKPDAETLKVMKQPRCGVPDVAQFVLTEGNPRWEQTHLTYRIENYTPDLPRADVDHAIEKAFQLWSNVTPLTFTKVSEGQADIMISFVRGDHRDNSPFDGPGGNLAHAFQPGPGIGGDAHFDEDERWTNNFREYNLHRVAAHELGHSLGLSHSTDIGALMYPSYTFSGDVQLAQDDIDGIQAIYGRSQNPVQPIGPQTDKACDSKLTFDAITTIRGEVMFFKDRFYMRTNPFYPEVELNFISVFWPQLPNGLEAAYEFADRDEVRFFKGNKYWAVQGQNVLHGYPKDIYSSFGFPRTVKHIDAALSEENTGKTYFFVANKYWRYDEYKRSMDPGYPKMIAHDFPGIGHKVDAVFMKDGFFYFFHGTRQYKFDPKTKRILTLQKANSWFNCRKN

SEQ ID NO: 3403 - protein, 450 aa, Artificial Sequence
  MMP-1 variant P256E
FPATLETQEQDVDLVQKYLEKYYNLKNDGRQVEKRRNSGPVVEKLKQMQEFFGLKVTGKPDAETLKVMKQPRCGVPDVAQFVLTEGNPRWEQTHLTYRIENYTPDLPRADVDHAIEKAFQLWSNVTPLTFTKVSEGQADIMISFVRGDHRDNSPFDGPGGNLAHAFQPGPGIGGDAHFDEDERWTNNFREYNLHRVAAHELGHSLGLSHSTDIGALMYPSYTFSGDVQLAQDDIDGIQAIYGRSQNPVQPIGPQTEKACDSKLTFDAITTIRGEVMFFKDRFYMRTNPFYPEVELNFISVFWPQLPNGLEAAYEFADRDEVRFFKGNKYWAVQGQNVLHGYPKDIYSSFGFPRTVKHIDAALSEENTGKTYFFVANKYWRYDEYKRSMDPGYPKMIAHDFPGIGHKVDAVFMKDGFFYFFHGTRQYKFDPKTKRILTLQKANSWFNCRKN

SEQ ID NO: 3404 - protein, 450 aa, Artificial Sequence
  MMP-1 variant P256H
FPATLETQEQDVDLVQKYLEKYYNLKNDGRQVEKRRNSGPVVEKLKQMQEFFGLKVTGKPDAETLKVMKQPRCGVPDVAQFVLTEGNPRWEQTHLTYRIENYTPDLPRADVDHAIEKAFQLWSNVTPLTFTKVSEGQADIMISFVRGDHRDNSPFDGPGGNLAHAFQPGPGIGGDAHFDEDERWTNNFREYNLHRVAAHELGHSLGLSHSTDIGALMYPSYTFSGDVQLAQDDIDGIQAIYGRSQNPVQPIGPQTHKACDSKLTFDAITTIRGEVMFFKDRFYMRTNPFYPEVELNFISVFWPQLPNGLEAAYEFADRDEVRFFKGNKYWAVQGQNVLHGYPKDIYSSFGFPRTVKHIDAALSEENTGKTYFFVANKYWRYDEYKRSMDPGYPKMIAHDFPGIGHKVDAVFMKDGFFYFFHGTRQYKFDPKTKRILTLQKANSWFNCRKN

SEQ ID NO: 3405 - protein, 450 aa, Artificial Sequence
  MMP-1 variant P256K
FPATLETQEQDVDLVQKYLEKYYNLKNDGRQVEKRRNSGPVVEKLKQMQEFFGLKVTGKPDAETLKVMKQPRCGVPDVAQFVLTEGNPRWEQTHLTYRIENYTPDLPRADVDHAIEKAFQLWSNVTPLTFTKVSEGQADIMISFVRGDHRDNSPFDGPGGNLAHAFQPGPGIGGDAHFDEDERWTNNFREYNLHRVAAHELGHSLGLSHSTDIGALMYPSYTFSGDVQLAQDDIDGIQAIYGRSQNPVQPIGPQTKKACDSKLTFDAITTIRGEVMFFKDRFYMRTNPFYPEVELNFISVFWPQLPNGLEAAYEFADRDEVRFFKGNKYWAVQGQNVLHGYPKDIYSSFGFPRTVKHIDAALSEENTGKTYFFVANKYWRYDEYKRSMDPGYPKMIAHDFPGIGHKVDAVFMKDGFFYFFHGTRQYKFDPKTKRILTLQKANSWFNCRKN

SEQ ID NO: 3406 - protein, 450 aa, Artificial Sequence
  MMP-1 variant P256R
FPATLETQEQDVDLVQKYLEKYYNLKNDGRQVEKRRNSGPVVEKLKQMQEFFGLKVTGKPDAETLKVMKQPRCGVPDVAQFVLTEGNPRWEQTHLTYRIENYTPDLPRADVDHAIEKAFQLWSNVTPLTFTKVSEGQADIMISFVRGDHRDNSPFDGPGGNLAHAFQPGPGIGGDAHFDEDERWTNNFREYNLHRVAAHELGHSLGLSHSTDIGALMYPSYTFSGDVQLAQDDIDGIQAIYGRSQNPVQPIGPQTRKACDSKLTFDAITTIRGEVMFFKDRFYMRTNPFYPEVELNFISVFWPQLPNGLEAAYEFADRDEVRFFKGNKYWAVQGQNVLHGYPKDIYSSFGFPRTVKHIDAALSEENTGKTYFFVANKYWRYDEYKRSMDPGYPKMIAHDFPGIGHKVDAVFMKDGFFYFFHGTRQYKFDPKTKRILTLQKANSWFNCRKN

SEQ ID NO: 3407 - protein, 450 aa, Artificial Sequence
  MMP-1 variant P256C
FPATLETQEQDVDLVQKYLEKYYNLKNDGRQVEKRRNSGPVVEKLKQMQEFFGLKVTGKPDAETLKVMKQPRCGVPDVAQFVLTEGNPRWEQTHLTYRIENYTPDLPRADVDHAIEKAFQLWSNVTPLTFTKVSEGQADIMISFVRGDHRDNSPFDGPGGNLAHAFQPGPGIGGDAHFDEDERWTNNFREYNLHRVAAHELGHSLGLSHSTDIGALMYPSYTFSGDVQLAQDDIDGIQAIYGRSQNPVQPIGPQTCKACDSKLTFDAITTIRGEVMFFKDRFYMRTNPFYPEVELNFISVFWPQLPNGLEAAYEFADRDEVRFFKGNKYWAVQGQNVLHGYPKDIYSSFGFPRTVKHIDAALSEENTGKTYFFVANKYWRYDEYKRSMDPGYPKMIAHDFPGIGHKVDAVFMKDGFFYFFHGTRQYKFDPKTKRILTLQKANSWFNCRKN

SEQ ID NO: 3408 - protein, 450 aa, Artificial Sequence
  MMP-1 variant P256N
FPATLETQEQDVDLVQKYLEKYYNLKNDGRQVEKRRNSGPVVEKLKQMQEFFGLKVTGKPDAETLKVMKQPRCGVPDVAQFVLTEGNPRWEQTHLTYRIENYTPDLPRADVDHAIEKAFQLWSNVTPLTFTKVSEGQADIMISFVRGDHRDNSPFDGPGGNLAHAFQPGPGIGGDAHFDEDERWTNNFREYNLHRVAAHELGHSLGLSHSTDIGALMYPSYTFSGDVQLAQDDIDGIQAIYGRSQNPVQPIGPQTNKACDSKLTFDAITTIRGEVMFFKDRFYMRTNPFYPEVELNFISVFWPQLPNGLEAAYEFADRDEVRFFKGNKYWAVQGQNVLHGYPKDIYSSFGFPRTVKHIDAALSEENTGKTYFFVANKYWRYDEYKRSMDPGYPKMIAHDFPGIGHKVDAVFMKDGFFYFFHGTRQYKFDPKTKRILTLQKANSWFNCRKN

SEQ ID NO: 3409 - protein, 450 aa, Artificial Sequence
  MMP-1 variant P256Q
FPATLETQEQDVDLVQKYLEKYYNLKNDGRQVEKRRNSGPVVEKLKQMQEFFGLKVTGKPDAETLKVMKQPRCGVPDVAQFVLTEGNPRWEQTHLTYRIENYTPDLPRADVDHAIEKAFQLWSNVTPLTFTKVSEGQADIMISFVRGDHRDNSPFDGPGGNLAHAFQPGPGIGGDAHFDEDERWTNNFREYNLHRVAAHELGHSLGLSHSTDIGALMYPSYTFSGDVQLAQDDIDGIQAIYGRSQNPVQPIGPQTQKACDSKLTFDAITTIRGEVMFFKDRFYMRTNPFYPEVELNFISVFWPQLPNGLEAAYEFADRDEVRFFKGNKYWAVQGQNVLHGYPKDIYSSFGFPRTVKHIDAALSEENTGKTYFFVANKYWRYDEYKRSMDPGYPKMIAHDFPGIGHKVDAVFMKDGFFYFFHGTRQYKFDPKTKRILTLQKANSWFNCRKN

SEQ ID NO: 3410 - protein, 450 aa, Artificial Sequence
  MMP-1 variant P256T
FPATLETQEQDVDLVQKYLEKYYNLKNDGRQVEKRRNSGPVVEKLKQMQEFFGLKVTGKPDAETLKVMKQPRCGVPDVAQFVLTEGNPRWEQTHLTYRIENYTPDLPRADVDHAIEKAFQLWSNVTPLTFTKVSEGQADIMISFVRGDHRDNSPFDGPGGNLAHAFQPGPGIGGDAHFDEDERWTNNFREYNLHRVAAHELGHSLGLSHSTDIGALMYPSYTFSGDVQLAQDDIDGIQAIYGRSQNPVQPIGPQTTKACDSKLTFDAITTIRGEVMFFKDRFYMRTNPFYPEVELNFISVFWPQLPNGLEAAYEFADRDEVRFFKGNKYWAVQGQNVLHGYPKDIYSSFGFPRTVKHIDAALSEENTGKTYFFVANKYWRYDEYKRSMDPGYPKMIAHDFPGIGHKVDAVFMKDGFFYFFHGTRQYKFDPKTKRILTLQKANSWFNCRKN

SEQ ID NO: 3411 - protein, 450 aa, Artificial Sequence
  MMP-1 variant P256Y
FPATLETQEQDVDLVQKYLEKYYNLKNDGRQVEKRRNSGPVVEKLKQMQEFFGLKVTGKPDAETLKVMKQPRCGVPDVAQFVLTEGNPRWEQTHLTYRIENYTPDLPRADVDHAIEKAFQLWSNVTPLTFTKVSEGQADIMISFVRGDHRDNSPFDGPGGNLAHAFQPGPGIGGDAHFDEDERWTNNFREYNLHRVAAHELGHSLGLSHSTDIGALMYPSYTFSGDVQLAQDDIDGIQAIYGRSQNPVQPIGPQTYKACDSKLTFDAITTIRGEVMFFKDRFYMRTNPFYPEVELNFISVFWPQLPNGLEAAYEFADRDEVRFFKGNKYWAVQGQNVLHGYPKDIYSSFGFPRTVKHIDAALSEENTGKTYFFVANKYWRYDEYKRSMDPGYPKMIAHDFPGIGHKVDAVFMKDGFFYFFHGTRQYKFDPKTKRILTLQKANSWFNCRKN

SEQ ID NO: 3412 - protein, 450 aa, Artificial Sequence
  MMP-1 variant P256S
FPATLETQEQDVDLVQKYLEKYYNLKNDGRQVEKRRNSGPVVEKLKQMQEFFGLKVTGKPDAETLKVMKQPRCGVPDVAQFVLTEGNPRWEQTHLTYRIENYTPDLPRADVDHAIEKAFQLWSNVTPLTFTKVSEGQADIMISFVRGDHRDNSPFDGPGGNLAHAFQPGPGIGGDAHFDEDERWTNNFREYNLHRVAAHELGHSLGLSHSTDIGALMYPSYTFSGDVQLAQDDIDGIQAIYGRSQNPVQPIGPQTSKACDSKLTFDAITTIRGEVMFFKDRFYMRTNPFYPEVELNFISVFWPQLPNGLEAAYEFADRDEVRFFKGNKYWAVQGQNVLHGYPKDIYSSFGFPRTVKHIDAALSEENTGKTYFFVANKYWRYDEYKRSMDPGYPKMIAHDFPGIGHKVDAVFMKDGFFYFFHGTRQYKFDPKTKRILTLQKANSWFNCRKN

SEQ ID NO: 3413 - protein, 450 aa, Artificial Sequence
  MMP-1 variant P256G
FPATLETQEQDVDLVQKYLEKYYNLKNDGRQVEKRRNSGPVVEKLKQMQEFFGLKVTGKPDAETLKVMKQPRCGVPDVAQFVLTEGNPRWEQTHLTYRIENYTPDLPRADVDHAIEKAFQLWSNVTPLTFTKVSEGQADIMISFVRGDHRDNSPFDGPGGNLAHAFQPGPGIGGDAHFDEDERWTNNFREYNLHRVAAHELGHSLGLSHSTDIGALMYPSYTFSGDVQLAQDDIDGIQAIYGRSQNPVQPIGPQTGKACDSKLTFDAITTIRGEVMFFKDRFYMRTNPFYPEVELNFISVFWPQLPNGLEAAYEFADRDEVRFFKGNKYWAVQGQNVLHGYPKDIYSSFGFPRTVKHIDAALSEENTGKTYFFVANKYWRYDEYKRSMDPGYPKMIAHDFPGIGHKVDAVFMKDGFFYFFHGTRQYKFDPKTKRILTLQKANSWFNCRKN

SEQ ID NO: 3414 - protein, 450 aa, Artificial Sequence
  MMP-1 variant P256F
FPATLETQEQDVDLVQKYLEKYYNLKNDGRQVEKRRNSGPVVEKLKQMQEFFGLKVTGKPDAETLKVMKQPRCGVPDVAQFVLTEGNPRWEQTHLTYRIENYTPDLPRADVDHAIEKAFQLWSNVTPLTFTKVSEGQADIMISFVRGDHRDNSPFDGPGGNLAHAFQPGPGIGGDAHFDEDERWTNNFREYNLHRVAAHELGHSLGLSHSTDIGALMYPSYTFSGDVQLAQDDIDGIQAIYGRSQNPVQPIGPQTFKACDSKLTFDAITTIRGEVMFFKDRFYMRTNPFYPEVELNFISVFWPQLPNGLEAAYEFADRDEVRFFKGNKYWAVQGQNVLHGYPKDIYSSFGFPRTVKHIDAALSEENTGKTYFFVANKYWRYDEYKRSMDPGYPKMIAHDFPGIGHKVDAVFMKDGFFYFFHGTRQYKFDPKTKRILTLQKANSWFNCRKN

SEQ ID NO: 3415 - protein, 450 aa, Artificial Sequence
  MMP-1 variant P256M
FPATLETQEQDVDLVQKYLEKYYNLKNDGRQVEKRRNSGPVVEKLKQMQEFFGLKVTGKPDAETLKVMKQPRCGVPDVAQFVLTEGNPRWEQTHLTYRIENYTPDLPRADVDHAIEKAFQLWSNVTPLTFTKVSEGQADIMISFVRGDHRDNSPFDGPGGNLAHAFQPGPGIGGDAHFDEDERWTNNFREYNLHRVAAHELGHSLGLSHSTDIGALMYPSYTFSGDVQLAQDDIDGIQAIYGRSQNPVQPIGPQTMKACDSKLTFDAITTIRGEVMFFKDRFYMRTNPFYPEVELNFISVFWPQLPNGLEAAYEFADRDEVRFFKGNKYWAVQGQNVLHGYPKDIYSSFGFPRTVKHIDAALSEENTGKTYFFVANKYWRYDEYKRSMDPGYPKMIAHDFPGIGHKVDAVFMKDGFFYFFHGTRQYKFDPKTKRILTLQKANSWFNCRKN

SEQ ID NO: 3416 - protein, 450 aa, Artificial Sequence
  MMP-1 variant P256W
FPATLETQEQDVDLVQKYLEKYYNLKNDGRQVEKRRNSGPVVEKLKQMQEFFGLKVTGKPDAETLKVMKQPRCGVPDVAQFVLTEGNPRWEQTHLTYRIENYTPDLPRADVDHAIEKAFQLWSNVTPLTFTKVSEGQADIMISFVRGDHRDNSPFDGPGGNLAHAFQPGPGIGGDAHFDEDERWTNNFREYNLHRVAAHELGHSLGLSHSTDIGALMYPSYTFSGDVQLAQDDIDGIQAIYGRSQNPVQPIGPQTWKACDSKLTFDAITTIRGEVMFFKDRFYMRTNPFYPEVELNFISVFWPQLPNGLEAAYEFADRDEVRFFKGNKYWAVQGQNVLHGYPKDIYSSFGFPRTVKHIDAALSEENTGKTYFFVANKYWRYDEYKRSMDPGYPKMIAHDFPGIGHKVDAVFMKDGFFYFFHGTRQYKFDPKTKRILTLQKANSWFNCRKN

SEQ ID NO: 3417 - protein, 450 aa, Artificial Sequence
  MMP-1 variant P256I
FPATLETQEQDVDLVQKYLEKYYNLKNDGRQVEKRRNSGPVVEKLKQMQEFFGLKVTGKPDAETLKVMKQPRCGVPDVAQFVLTEGNPRWEQTHLTYRIENYTPDLPRADVDHAIEKAFQLWSNVTPLTFTKVSEGQADIMISFVRGDHRDNSPFDGPGGNLAHAFQPGPGIGGDAHFDEDERWTNNFREYNLHRVAAHELGHSLGLSHSTDIGALMYPSYTFSGDVQLAQDDIDGIQAIYGRSQNPVQPIGPQTIKACDSKLTFDAITTIRGEVMFFKDRFYMRTNPFYPEVELNFISVFWPQLPNGLEAAYEFADRDEVRFFKGNKYWAVQGQNVLHGYPKDIYSSFGFPRTVKHIDAALSEENTGKTYFFVANKYWRYDEYKRSMDPGYPKMIAHDFPGIGHKVDAVFMKDGFFYFFHGTRQYKFDPKTKRILTLQKANSWFNCRKN

SEQ ID NO: 3418 - protein, 450 aa, Artificial Sequence
  MMP-1 variant P256V
FPATLETQEQDVDLVQKYLEKYYNLKNDGRQVEKRRNSGPVVEKLKQMQEFFGLKVTGKPDAETLKVMKQPRCGVPDVAQFVLTEGNPRWEQTHLTYRIENYTPDLPRADVDHAIEKAFQLWSNVTPLTFTKVSEGQADIMISFVRGDHRDNSPFDGPGGNLAHAFQPGPGIGGDAHFDEDERWTNNFREYNLHRVAAHELGHSLGLSHSTDIGALMYPSYTFSGDVQLAQDDIDGIQAIYGRSQNPVQPIGPQTVKACDSKLTFDAITTIRGEVMFFKDRFYMRTNPFYPEVELNFISVFWPQLPNGLEAAYEFADRDEVRFFKGNKYWAVQGQNVLHGYPKDIYSSFGFPRTVKHIDAALSEENTGKTYFFVANKYWRYDEYKRSMDPGYPKMIAHDFPGIGHKVDAVFMKDGFFYFFHGTRQYKFDPKTKRILTLQKANSWFNCRKN

SEQ ID NO: 3419 - protein, 450 aa, Artificial Sequence
  MMP-1 variant P256L
FPATLETQEQDVDLVQKYLEKYYNLKNDGRQVEKRRNSGPVVEKLKQMQEFFGLKVTGKPDAETLKVMKQPRCGVPDVAQFVLTEGNPRWEQTHLTYRIENYTPDLPRADVDHAIEKAFQLWSNVTPLTFTKVSEGQADIMISFVRGDHRDNSPFDGPGGNLAHAFQPGPGIGGDAHFDEDERWTNNFREYNLHRVAAHELGHSLGLSHSTDIGALMYPSYTFSGDVQLAQDDIDGIQAIYGRSQNPVQPIGPQTLKACDSKLTFDAITTIRGEVMFFKDRFYMRTNPFYPEVELNFISVFWPQLPNGLEAAYEFADRDEVRFFKGNKYWAVQGQNVLHGYPKDIYSSFGFPRTVKHIDAALSEENTGKTYFFVANKYWRYDEYKRSMDPGYPKMIAHDFPGIGHKVDAVFMKDGFFYFFHGTRQYKFDPKTKRILTLQKANSWFNCRKN

SEQ ID NO: 3420 - protein, 450 aa, Artificial Sequence
  MMP-1 variant P256A
FPATLETQEQDVDLVQKYLEKYYNLKNDGRQVEKRRNSGPVVEKLKQMQEFFGLKVTGKPDAETLKVMKQPRCGVPDVAQFVLTEGNPRWEQTHLTYRIENYTPDLPRADVDHAIEKAFQLWSNVTPLTFTKVSEGQADIMISFVRGDHRDNSPFDGPGGNLAHAFQPGPGIGGDAHFDEDERWTNNFREYNLHRVAAHELGHSLGLSHSTDIGALMYPSYTFSGDVQLAQDDIDGIQAIYGRSQNPVQPIGPQTAKACDSKLTFDAITTIRGEVMFFKDRFYMRTNPFYPEVELNFISVFWPQLPNGLEAAYEFADRDEVRFFKGNKYWAVQGQNVLHGYPKDIYSSFGFPRTVKHIDAALSEENTGKTYFFVANKYWRYDEYKRSMDPGYPKMIAHDFPGIGHKVDAVFMKDGFFYFFHGTRQYKFDPKTKRILTLQKANSWFNCRKN

SEQ ID NO: 3421 - protein, 450 aa, Artificial Sequence
  MMP-1 variant K257D
FPATLETQEQDVDLVQKYLEKYYNLKNDGRQVEKRRNSGPVVEKLKQMQEFFGLKVTGKPDAETLKVMKQPRCGVPDVAQFVLTEGNPRWEQTHLTYRIENYTPDLPRADVDHAIEKAFQLWSNVTPLTFTKVSEGQADIMISFVRGDHRDNSPFDGPGGNLAHAFQPGPGIGGDAHFDEDERWTNNFREYNLHRVAAHELGHSLGLSHSTDIGALMYPSYTFSGDVQLAQDDIDGIQAIYGRSQNPVQPIGPQTPDACDSKLTFDAITTIRGEVMFFKDRFYMRTNPFYPEVELNFISVFWPQLPNGLEAAYEFADRDEVRFFKGNKYWAVQGQNVLHGYPKDIYSSFGFPRTVKHIDAALSEENTGKTYFFVANKYWRYDEYKRSMDPGYPKMIAHDFPGIGHKVDAVFMKDGFFYFFHGTRQYKFDPKTKRILTLQKANSWFNCRKN

SEQ ID NO: 3422 - protein, 450 aa, Artificial Sequence
  MMP-1 variant K257E
FPATLETQEQDVDLVQKYLEKYYNLKNDGRQVEKRRNSGPVVEKLKQMQEFFGLKVTGKPDAETLKVMKQPRCGVPDVAQFVLTEGNPRWEQTHLTYRIENYTPDLPRADVDHAIEKAFQLWSNVTPLTFTKVSEGQADIMISFVRGDHRDNSPFDGPGGNLAHAFQPGPGIGGDAHFDEDERWTNNFREYNLHRVAAHELGHSLGLSHSTDIGALMYPSYTFSGDVQLAQDDIDGIQAIYGRSQNPVQPIGPQTPEACDSKLTFDAITTIRGEVMFFKDRFYMRTNPFYPEVELNFISVFWPQLPNGLEAAYEFADRDEVRFFKGNKYWAVQGQNVLHGYPKDIYSSFGFPRTVKHIDAALSEENTGKTYFFVANKYWRYDEYKRSMDPGYPKMIAHDFPGIGHKVDAVFMKDGFFYFFHGTRQYKFDPKTKRILTLQKANSWFNCRKN

SEQ ID NO: 3423 - protein, 450 aa, Artificial Sequence
  MMP-1 variant K257H
FPATLETQEQDVDLVQKYLEKYYNLKNDGRQVEKRRNSGPVVEKLKQMQEFFGLKVTGKPDAETLKVMKQPRCGVPDVAQFVLTEGNPRWEQTHLTYRIENYTPDLPRADVDHAIEKAFQLWSNVTPLTFTKVSEGQADIMISFVRGDHRDNSPFDGPGGNLAHAFQPGPGIGGDAHFDEDERWTNNFREYNLHRVAAHELGHSLGLSHSTDIGALMYPSYTFSGDVQLAQDDIDGIQAIYGRSQNPVQPIGPQTPHACDSKLTFDAITTIRGEVMFFKDRFYMRTNPFYPEVELNFISVFWPQLPNGLEAAYEFADRDEVRFFKGNKYWAVQGQNVLHGYPKDIYSSFGFPRTVKHIDAALSEENTGKTYFFVANKYWRYDEYKRSMDPGYPKMIAHDFPGIGHKVDAVFMKDGFFYFFHGTRQYKFDPKTKRILTLQKANSWFNCRKN

SEQ ID NO: 3424 - protein, 450 aa, Artificial Sequence
  MMP-1 variant K257R
FPATLETQEQDVDLVQKYLEKYYNLKNDGRQVEKRRNSGPVVEKLKQMQEFFGLKVTGKPDAETLKVMKQPRCGVPDVAQFVLTEGNPRWEQTHLTYRIENYTPDLPRADVDHAIEKAFQLWSNVTPLTFTKVSEGQADIMISFVRGDHRDNSPFDGPGGNLAHAFQPGPGIGGDAHFDEDERWTNNFREYNLHRVAAHELGHSLGLSHSTDIGALMYPSYTFSGDVQLAQDDIDGIQAIYGRSQNPVQPIGPQTPRACDSKLTFDAITTIRGEVMFFKDRFYMRTNPFYPEVELNFISVFWPQLPNGLEAAYEFADRDEVRFFKGNKYWAVQGQNVLHGYPKDIYSSFGFPRTVKHIDAALSEENTGKTYFFVANKYWRYDEYKRSMDPGYPKMIAHDFPGIGHKVDAVFMKDGFFYFFHGTRQYKFDPKTKRILTLQKANSWFNCRKN

SEQ ID NO: 3425 - protein, 450 aa, Artificial Sequence
  MMP-1 variant K257C
FPATLETQEQDVDLVQKYLEKYYNLKNDGRQVEKRRNSGPVVEKLKQMQEFFGLKVTGKPDAETLKVMKQPRCGVPDVAQFVLTEGNPRWEQTHLTYRIENYTPDLPRADVDHAIEKAFQLWSNVTPLTFTKVSEGQADIMISFVRGDHRDNSPFDGPGGNLAHAFQPGPGIGGDAHFDEDERWTNNFREYNLHRVAAHELGHSLGLSHSTDIGALMYPSYTFSGDVQLAQDDIDGIQAIYGRSQNPVQPIGPQTPCACDSKLTFDAITTIRGEVMFFKDRFYMRTNPFYPEVELNFISVFWPQLPNGLEAAYEFADRDEVRFFKGNKYWAVQGQNVLHGYPKDIYSSFGFPRTVKHIDAALSEENTGKTYFFVANKYWRYDEYKRSMDPGYPKMIAHDFPGIGHKVDAVFMKDGFFYFFHGTRQYKFDPKTKRILTLQKANSWFNCRKN

SEQ ID NO: 3426 - protein, 450 aa, Artificial Sequence
  MMP-1 variant K257N
FPATLETQEQDVDLVQKYLEKYYNLKNDGRQVEKRRNSGPVVEKLKQMQEFFGLKVTGKPDAETLKVMKQPRCGVPDVAQFVLTEGNPRWEQTHLTYRIENYTPDLPRADVDHAIEKAFQLWSNVTPLTFTKVSEGQADIMISFVRGDHRDNSPFDGPGGNLAHAFQPGPGIGGDAHFDEDERWTNNFREYNLHRVAAHELGHSLGLSHSTDIGALMYPSYTFSGDVQLAQDDIDGIQAIYGRSQNPVQPIGPQTPNACDSKLTFDAITTIRGEVMFFKDRFYMRTNPFYPEVELNFISVFWPQLPNGLEAAYEFADRDEVRFFKGNKYWAVQGQNVLHGYPKDIYSSFGFPRTVKHIDAALSEENTGKTYFFVANKYWRYDEYKRSMDPGYPKMIAHDFPGIGHKVDAVFMKDGFFYFFHGTRQYKFDPKTKRILTLQKANSWFNCRKN

SEQ ID NO: 3427 - protein, 450 aa, Artificial Sequence
  MMP-1 variant K257Q
FPATLETQEQDVDLVQKYLEKYYNLKNDGRQVEKRRNSGPVVEKLKQMQEFFGLKVTGKPDAETLKVMKQPRCGVPDVAQFVLTEGNPRWEQTHLTYRIENYTPDLPRADVDHAIEKAFQLWSNVTPLTFTKVSEGQADIMISFVRGDHRDNSPFDGPGGNLAHAFQPGPGIGGDAHFDEDERWTNNFREYNLHRVAAHELGHSLGLSHSTDIGALMYPSYTFSGDVQLAQDDIDGIQAIYGRSQNPVQPIGPQTPQACDSKLTFDAITTIRGEVMFFKDRFYMRTNPFYPEVELNFISVFWPQLPNGLEAAYEFADRDEVRFFKGNKYWAVQGQNVLHGYPKDIYSSFGFPRTVKHIDAALSEENTGKTYFFVANKYWRYDEYKRSMDPGYPKMIAHDFPGIGHKVDAVFMKDGFFYFFHGTRQYKFDPKTKRILTLQKANSWFNCRKN

SEQ ID NO: 3428 - protein, 450 aa, Artificial Sequence
  MMP-1 variant K257T
FPATLETQEQDVDLVQKYLEKYYNLKNDGRQVEKRRNSGPVVEKLKQMQEFFGLKVTGKPDAETLKVMKQPRCGVPDVAQFVLTEGNPRWEQTHLTYRIENYTPDLPRADVDHAIEKAFQLWSNVTPLTFTKVSEGQADIMISFVRGDHRDNSPFDGPGGNLAHAFQPGPGIGGDAHFDEDERWTNNFREYNLHRVAAHELGHSLGLSHSTDIGALMYPSYTFSGDVQLAQDDIDGIQAIYGRSQNPVQPIGPQTPTACDSKLTFDAITTIRGEVMFFKDRFYMRTNPFYPEVELNFISVFWPQLPNGLEAAYEFADRDEVRFFKGNKYWAVQGQNVLHGYPKDIYSSFGFPRTVKHIDAALSEENTGKTYFFVANKYWRYDEYKRSMDPGYPKMIAHDFPGIGHKVDAVFMKDGFFYFFHGTRQYKFDPKTKRILTLQKANSWFNCRKN

SEQ ID NO: 3429 - protein, 450 aa, Artificial Sequence
  MMP-1 variant K257Y
FPATLETQEQDVDLVQKYLEKYYNLKNDGRQVEKRRNSGPVVEKLKQMQEFFGLKVTGKPDAETLKVMKQPRCGVPDVAQFVLTEGNPRWEQTHLTYRIENYTPDLPRADVDHAIEKAFQLWSNVTPLTFTKVSEGQADIMISFVRGDHRDNSPFDGPGGNLAHAFQPGPGIGGDAHFDEDERWTNNFREYNLHRVAAHELGHSLGLSHSTDIGALMYPSYTFSGDVQLAQDDIDGIQAIYGRSQNPVQPIGPQTPYACDSKLTFDAITTIRGEVMFFKDRFYMRTNPFYPEVELNFISVFWPQLPNGLEAAYEFADRDEVRFFKGNKYWAVQGQNVLHGYPKDIYSSFGFPRTVKHIDAALSEENTGKTYFFVANKYWRYDEYKRSMDPGYPKMIAHDFPGIGHKVDAVFMKDGFFYFFHGTRQYKFDPKTKRILTLQKANSWFNCRKN

SEQ ID NO: 3430 - protein, 450 aa, Artificial Sequence
  MMP-1 variant K257S
FPATLETQEQDVDLVQKYLEKYYNLKNDGRQVEKRRNSGPVVEKLKQMQEFFGLKVTGKPDAETLKVMKQPRCGVPDVAQFVLTEGNPRWEQTHLTYRIENYTPDLPRADVDHAIEKAFQLWSNVTPLTFTKVSEGQADIMISFVRGDHRDNSPFDGPGGNLAHAFQPGPGIGGDAHFDEDERWTNNFREYNLHRVAAHELGHSLGLSHSTDIGALMYPSYTFSGDVQLAQDDIDGIQAIYGRSQNPVQPIGPQTPSACDSKLTFDAITTIRGEVMFFKDRFYMRTNPFYPEVELNFISVFWPQLPNGLEAAYEFADRDEVRFFKGNKYWAVQGQNVLHGYPKDIYSSFGFPRTVKHIDAALSEENTGKTYFFVANKYWRYDEYKRSMDPGYPKMIAHDFPGIGHKVDAVFMKDGFFYFFHGTRQYKFDPKTKRILTLQKANSWFNCRKN

SEQ ID NO: 3431 - protein, 450 aa, Artificial Sequence
  MMP-1 variant K257G
FPATLETQEQDVDLVQKYLEKYYNLKNDGRQVEKRRNSGPVVEKLKQMQEFFGLKVTGKPDAETLKVMKQPRCGVPDVAQFVLTEGNPRWEQTHLTYRIENYTPDLPRADVDHAIEKAFQLWSNVTPLTFTKVSEGQADIMISFVRGDHRDNSPFDGPGGNLAHAFQPGPGIGGDAHFDEDERWTNNFREYNLHRVAAHELGHSLGLSHSTDIGALMYPSYTFSGDVQLAQDDIDGIQAIYGRSQNPVQPIGPQTPGACDSKLTFDAITTIRGEVMFFKDRFYMRTNPFYPEVELNFISVFWPQLPNGLEAAYEFADRDEVRFFKGNKYWAVQGQNVLHGYPKDIYSSFGFPRTVKHIDAALSEENTGKTYFFVANKYWRYDEYKRSMDPGYPKMIAHDFPGIGHKVDAVFMKDGFFYFFHGTRQYKFDPKTKRILTLQKANSWFNCRKN

SEQ ID NO: 3432 - protein, 450 aa, Artificial Sequence
  MMP-1 variant K257F
FPATLETQEQDVDLVQKYLEKYYNLKNDGRQVEKRRNSGPVVEKLKQMQEFFGLKVTGKPDAETLKVMKQPRCGVPDVAQFVLTEGNPRWEQTHLTYRIENYTPDLPRADVDHAIEKAFQLWSNVTPLTFTKVSEGQADIMISFVRGDHRDNSPFDGPGGNLAHAFQPGPGIGGDAHFDEDERWTNNFREYNLHRVAAHELGHSLGLSHSTDIGALMYPSYTFSGDVQLAQDDIDGIQAIYGRSQNPVQPIGPQTPFACDSKLTFDAITTIRGEVMFFKDRFYMRTNPFYPEVELNFISVFWPQLPNGLEAAYEFADRDEVRFFKGNKYWAVQGQNVLHGYPKDIYSSFGFPRTVKHIDAALSEENTGKTYFFVANKYWRYDEYKRSMDPGYPKMIAHDFPGIGHKVDAVFMKDGFFYFFHGTRQYKFDPKTKRILTLQKANSWFNCRKN

SEQ ID NO: 3433 - protein, 450 aa, Artificial Sequence
  MMP-1 variant K257M
FPATLETQEQDVDLVQKYLEKYYNLKNDGRQVEKRRNSGPVVEKLKQMQEFFGLKVTGKPDAETLKVMKQPRCGVPDVAQFVLTEGNPRWEQTHLTYRIENYTPDLPRADVDHAIEKAFQLWSNVTPLTFTKVSEGQADIMISFVRGDHRDNSPFDGPGGNLAHAFQPGPGIGGDAHFDEDERWTNNFREYNLHRVAAHELGHSLGLSHSTDIGALMYPSYTFSGDVQLAQDDIDGIQAIYGRSQNPVQPIGPQTPMACDSKLTFDAITTIRGEVMFFKDRFYMRTNPFYPEVELNFISVFWPQLPNGLEAAYEFADRDEVRFFKGNKYWAVQGQNVLHGYPKDIYSSFGFPRTVKHIDAALSEENTGKTYFFVANKYWRYDEYKRSMDPGYPKMIAHDFPGIGHKVDAVFMKDGFFYFFHGTRQYKFDPKTKRILTLQKANSWFNCRKN

SEQ ID NO: 3434 - protein, 450 aa, Artificial Sequence
  MMP-1 variant K257W
FPATLETQEQDVDLVQKYLEKYYNLKNDGRQVEKRRNSGPVVEKLKQMQEFFGLKVTGKPDAETLKVMKQPRCGVPDVAQFVLTEGNPRWEQTHLTYRIENYTPDLPRADVDHAIEKAFQLWSNVTPLTFTKVSEGQADIMISFVRGDHRDNSPFDGPGGNLAHAFQPGPGIGGDAHFDEDERWTNNFREYNLHRVAAHELGHSLGLSHSTDIGALMYPSYTFSGDVQLAQDDIDGIQAIYGRSQNPVQPIGPQTPWACDSKLTFDAITTIRGEVMFFKDRFYMRTNPFYPEVELNFISVFWPQLPNGLEAAYEFADRDEVRFFKGNKYWAVQGQNVLHGYPKDIYSSFGFPRTVKHIDAALSEENTGKTYFFVANKYWRYDEYKRSMDPGYPKMIAHDFPGIGHKVDAVFMKDGFFYFFHGTRQYKFDPKTKRILTLQKANSWFNCRKN

SEQ ID NO: 3435 - protein, 450 aa, Artificial Sequence
  MMP-1 variant K257I
FPATLETQEQDVDLVQKYLEKYYNLKNDGRQVEKRRNSGPVVEKLKQMQEFFGLKVTGKPDAETLKVMKQPRCGVPDVAQFVLTEGNPRWEQTHLTYRIENYTPDLPRADVDHAIEKAFQLWSNVTPLTFTKVSEGQADIMISFVRGDHRDNSPFDGPGGNLAHAFQPGPGIGGDAHFDEDERWTNNFREYNLHRVAAHELGHSLGLSHSTDIGALMYPSYTFSGDVQLAQDDIDGIQAIYGRSQNPVQPIGPQTPIACDSKLTFDAITTIRGEVMFFKDRFYMRTNPFYPEVELNFISVFWPQLPNGLEAAYEFADRDEVRFFKGNKYWAVQGQNVLHGYPKDIYSSFGFPRTVKHIDAALSEENTGKTYFFVANKYWRYDEYKRSMDPGYPKMIAHDFPGIGHKVDAVFMKDGFFYFFHGTRQYKFDPKTKRILTLQKANSWFNCRKN

SEQ ID NO: 3436 - protein, 450 aa, Artificial Sequence
  MMP-1 variant K257V
FPATLETQEQDVDLVQKYLEKYYNLKNDGRQVEKRRNSGPVVEKLKQMQEFFGLKVTGKPDAETLKVMKQPRCGVPDVAQFVLTEGNPRWEQTHLTYRIENYTPDLPRADVDHAIEKAFQLWSNVTPLTFTKVSEGQADIMISFVRGDHRDNSPFDGPGGNLAHAFQPGPGIGGDAHFDEDERWTNNFREYNLHRVAAHELGHSLGLSHSTDIGALMYPSYTFSGDVQLAQDDIDGIQAIYGRSQNPVQPIGPQTPVACDSKLTFDAITTIRGEVMFFKDRFYMRTNPFYPEVELNFISVFWPQLPNGLEAAYEFADRDEVRFFKGNKYWAVQGQNVLHGYPKDIYSSFGFPRTVKHIDAALSEENTGKTYFFVANKYWRYDEYKRSMDPGYPKMIAHDFPGIGHKVDAVFMKDGFFYFFHGTRQYKFDPKTKRILTLQKANSWFNCRKN

SEQ ID NO: 3437 - protein, 450 aa, Artificial Sequence
  MMP-1 variant K257L
FPATLETQEQDVDLVQKYLEKYYNLKNDGRQVEKRRNSGPVVEKLKQMQEFFGLKVTGKPDAETLKVMKQPRCGVPDVAQFVLTEGNPRWEQTHLTYRIENYTPDLPRADVDHAIEKAFQLWSNVTPLTFTKVSEGQADIMISFVRGDHRDNSPFDGPGGNLAHAFQPGPGIGGDAHFDEDERWTNNFREYNLHRVAAHELGHSLGLSHSTDIGALMYPSYTFSGDVQLAQDDIDGIQAIYGRSQNPVQPIGPQTPLACDSKLTFDAITTIRGEVMFFKDRFYMRTNPFYPEVELNFISVFWPQLPNGLEAAYEFADRDEVRFFKGNKYWAVQGQNVLHGYPKDIYSSFGFPRTVKHIDAALSEENTGKTYFFVANKYWRYDEYKRSMDPGYPKMIAHDFPGIGHKVDAVFMKDGFFYFFHGTRQYKFDPKTKRILTLQKANSWFNCRKN

SEQ ID NO: 3438 - protein, 450 aa, Artificial Sequence
  MMP-1 variant K257A
FPATLETQEQDVDLVQKYLEKYYNLKNDGRQVEKRRNSGPVVEKLKQMQEFFGLKVTGKPDAETLKVMKQPRCGVPDVAQFVLTEGNPRWEQTHLTYRIENYTPDLPRADVDHAIEKAFQLWSNVTPLTFTKVSEGQADIMISFVRGDHRDNSPFDGPGGNLAHAFQPGPGIGGDAHFDEDERWTNNFREYNLHRVAAHELGHSLGLSHSTDIGALMYPSYTFSGDVQLAQDDIDGIQAIYGRSQNPVQPIGPQTPAACDSKLTFDAITTIRGEVMFFKDRFYMRTNPFYPEVELNFISVFWPQLPNGLEAAYEFADRDEVRFFKGNKYWAVQGQNVLHGYPKDIYSSFGFPRTVKHIDAALSEENTGKTYFFVANKYWRYDEYKRSMDPGYPKMIAHDFPGIGHKVDAVFMKDGFFYFFHGTRQYKFDPKTKRILTLQKANSWFNCRKN

SEQ ID NO: 3439 - protein, 450 aa, Artificial Sequence
  MMP-1 variant K257P
FPATLETQEQDVDLVQKYLEKYYNLKNDGRQVEKRRNSGPVVEKLKQMQEFFGLKVTGKPDAETLKVMKQPRCGVPDVAQFVLTEGNPRWEQTHLTYRIENYTPDLPRADVDHAIEKAFQLWSNVTPLTFTKVSEGQADIMISFVRGDHRDNSPFDGPGGNLAHAFQPGPGIGGDAHFDEDERWTNNFREYNLHRVAAHELGHSLGLSHSTDIGALMYPSYTFSGDVQLAQDDIDGIQAIYGRSQNPVQPIGPQTPPACDSKLTFDAITTIRGEVMFFKDRFYMRTNPFYPEVELNFISVFWPQLPNGLEAAYEFADRDEVRFFKGNKYWAVQGQNVLHGYPKDIYSSFGFPRTVKHIDAALSEENTGKTYFFVANKYWRYDEYKRSMDPGYPKMIAHDFPGIGHKVDAVFMKDGFFYFFHGTRQYKFDPKTKRILTLQKANSWFNCRKN

SEQ ID NO: 3440 - protein, 450 aa, Artificial Sequence
  MMP-1 variant A258D
FPATLETQEQDVDLVQKYLEKYYNLKNDGRQVEKRRNSGPVVEKLKQMQEFFGLKVTGKPDAETLKVMKQPRCGVPDVAQFVLTEGNPRWEQTHLTYRIENYTPDLPRADVDHAIEKAFQLWSNVTPLTFTKVSEGQADIMISFVRGDHRDNSPFDGPGGNLAHAFQPGPGIGGDAHFDEDERWTNNFREYNLHRVAAHELGHSLGLSHSTDIGALMYPSYTFSGDVQLAQDDIDGIQAIYGRSQNPVQPIGPQTPKDCDSKLTFDAITTIRGEVMFFKDRFYMRTNPFYPEVELNFISVFWPQLPNGLEAAYEFADRDEVRFFKGNKYWAVQGQNVLHGYPKDIYSSFGFPRTVKHIDAALSEENTGKTYFFVANKYWRYDEYKRSMDPGYPKMIAHDFPGIGHKVDAVFMKDGFFYFFHGTRQYKFDPKTKRILTLQKANSWFNCRKN

SEQ ID NO: 3441 - protein, 450 aa, Artificial Sequence
  MMP-1 variant A258E
FPATLETQEQDVDLVQKYLEKYYNLKNDGRQVEKRRNSGPVVEKLKQMQEFFGLKVTGKPDAETLKVMKQPRCGVPDVAQFVLTEGNPRWEQTHLTYRIENYTPDLPRADVDHAIEKAFQLWSNVTPLTFTKVSEGQADIMISFVRGDHRDNSPFDGPGGNLAHAFQPGPGIGGDAHFDEDERWTNNFREYNLHRVAAHELGHSLGLSHSTDIGALMYPSYTFSGDVQLAQDDIDGIQAIYGRSQNPVQPIGPQTPKECDSKLTFDAITTIRGEVMFFKDRFYMRTNPFYPEVELNFISVFWPQLPNGLEAAYEFADRDEVRFFKGNKYWAVQGQNVLHGYPKDIYSSFGFPRTVKHIDAALSEENTGKTYFFVANKYWRYDEYKRSMDPGYPKMIAHDFPGIGHKVDAVFMKDGFFYFFHGTRQYKFDPKTKRILTLQKANSWFNCRKN

SEQ ID NO: 3442 - protein, 450 aa, Artificial Sequence
  MMP-1 variant A258H
FPATLETQEQDVDLVQKYLEKYYNLKNDGRQVEKRRNSGPVVEKLKQMQEFFGLKVTGKPDAETLKVMKQPRCGVPDVAQFVLTEGNPRWEQTHLTYRIENYTPDLPRADVDHAIEKAFQLWSNVTPLTFTKVSEGQADIMISFVRGDHRDNSPFDGPGGNLAHAFQPGPGIGGDAHFDEDERWTNNFREYNLHRVAAHELGHSLGLSHSTDIGALMYPSYTFSGDVQLAQDDIDGIQAIYGRSQNPVQPIGPQTPKHCDSKLTFDAITTIRGEVMFFKDRFYMRTNPFYPEVELNFISVFWPQLPNGLEAAYEFADRDEVRFFKGNKYWAVQGQNVLHGYPKDIYSSFGFPRTVKHIDAALSEENTGKTYFFVANKYWRYDEYKRSMDPGYPKMIAHDFPGIGHKVDAVFMKDGFFYFFHGTRQYKFDPKTKRILTLQKANSWFNCRKN

SEQ ID NO: 3443 - protein, 450 aa, Artificial Sequence
  MMP-1 variant A258K
FPATLETQEQDVDLVQKYLEKYYNLKNDGRQVEKRRNSGPVVEKLKQMQEFFGLKVTGKPDAETLKVMKQPRCGVPDVAQFVLTEGNPRWEQTHLTYRIENYTPDLPRADVDHAIEKAFQLWSNVTPLTFTKVSEGQADIMISFVRGDHRDNSPFDGPGGNLAHAFQPGPGIGGDAHFDEDERWTNNFREYNLHRVAAHELGHSLGLSHSTDIGALMYPSYTFSGDVQLAQDDIDGIQAIYGRSQNPVQPIGPQTPKKCDSKLTFDAITTIRGEVMFFKDRFYMRTNPFYPEVELNFISVFWPQLPNGLEAAYEFADRDEVRFFKGNKYWAVQGQNVLHGYPKDIYSSFGFPRTVKHIDAALSEENTGKTYFFVANKYWRYDEYKRSMDPGYPKMIAHDFPGIGHKVDAVFMKDGFFYFFHGTRQYKFDPKTKRILTLQKANSWFNCRKN

SEQ ID NO: 3444 - protein, 450 aa, Artificial Sequence
  MMP-1 variant A258R
FPATLETQEQDVDLVQKYLEKYYNLKNDGRQVEKRRNSGPVVEKLKQMQEFFGLKVTGKPDAETLKVMKQPRCGVPDVAQFVLTEGNPRWEQTHLTYRIENYTPDLPRADVDHAIEKAFQLWSNVTPLTFTKVSEGQADIMISFVRGDHRDNSPFDGPGGNLAHAFQPGPGIGGDAHFDEDERWTNNFREYNLHRVAAHELGHSLGLSHSTDIGALMYPSYTFSGDVQLAQDDIDGIQAIYGRSQNPVQPIGPQTPKRCDSKLTFDAITTIRGEVMFFKDRFYMRTNPFYPEVELNFISVFWPQLPNGLEAAYEFADRDEVRFFKGNKYWAVQGQNVLHGYPKDIYSSFGFPRTVKHIDAALSEENTGKTYFFVANKYWRYDEYKRSMDPGYPKMIAHDFPGIGHKVDAVFMKDGFFYFFHGTRQYKFDPKTKRILTLQKANSWFNCRKN

SEQ ID NO: 3445 - protein, 450 aa, Artificial Sequence
  MMP-1 variant A258C
FPATLETQEQDVDLVQKYLEKYYNLKNDGRQVEKRRNSGPVVEKLKQMQEFFGLKVTGKPDAETLKVMKQPRCGVPDVAQFVLTEGNPRWEQTHLTYRIENYTPDLPRADVDHAIEKAFQLWSNVTPLTFTKVSEGQADIMISFVRGDHRDNSPFDGPGGNLAHAFQPGPGIGGDAHFDEDERWTNNFREYNLHRVAAHELGHSLGLSHSTDIGALMYPSYTFSGDVQLAQDDIDGIQAIYGRSQNPVQPIGPQTPKCCDSKLTFDAITTIRGEVMFFKDRFYMRTNPFYPEVELNFISVFWPQLPNGLEAAYEFADRDEVRFFKGNKYWAVQGQNVLHGYPKDIYSSFGFPRTVKHIDAALSEENTGKTYFFVANKYWRYDEYKRSMDPGYPKMIAHDFPGIGHKVDAVFMKDGFFYFFHGTRQYKFDPKTKRILTLQKANSWFNCRKN

SEQ ID NO: 3446 - protein, 450 aa, Artificial Sequence
  MMP-1 variant A258N
FPATLETQEQDVDLVQKYLEKYYNLKNDGRQVEKRRNSGPVVEKLKQMQEFFGLKVTGKPDAETLKVMKQPRCGVPDVAQFVLTEGNPRWEQTHLTYRIENYTPDLPRADVDHAIEKAFQLWSNVTPLTFTKVSEGQADIMISFVRGDHRDNSPFDGPGGNLAHAFQPGPGIGGDAHFDEDERWTNNFREYNLHRVAAHELGHSLGLSHSTDIGALMYPSYTFSGDVQLAQDDIDGIQAIYGRSQNPVQPIGPQTPKNCDSKLTFDAITTIRGEVMFFKDRFYMRTNPFYPEVELNFISVFWPQLPNGLEAAYEFADRDEVRFFKGNKYWAVQGQNVLHGYPKDIYSSFGFPRTVKHIDAALSEENTGKTYFFVANKYWRYDEYKRSMDPGYPKMIAHDFPGIGHKVDAVFMKDGFFYFFHGTRQYKFDPKTKRILTLQKANSWFNCRKN

SEQ ID NO: 3447 - protein, 450 aa, Artificial Sequence
  MMP-1 variant A258Q
FPATLETQEQDVDLVQKYLEKYYNLKNDGRQVEKRRNSGPVVEKLKQMQEFFGLKVTGKPDAETLKVMKQPRCGVPDVAQFVLTEGNPRWEQTHLTYRIENYTPDLPRADVDHAIEKAFQLWSNVTPLTFTKVSEGQADIMISFVRGDHRDNSPFDGPGGNLAHAFQPGPGIGGDAHFDEDERWTNNFREYNLHRVAAHELGHSLGLSHSTDIGALMYPSYTFSGDVQLAQDDIDGIQAIYGRSQNPVQPIGPQTPKQCDSKLTFDAITTIRGEVMFFKDRFYMRTNPFYPEVELNFISVFWPQLPNGLEAAYEFADRDEVRFFKGNKYWAVQGQNVLHGYPKDIYSSFGFPRTVKHIDAALSEENTGKTYFFVANKYWRYDEYKRSMDPGYPKMIAHDFPGIGHKVDAVFMKDGFFYFFHGTRQYKFDPKTKRILTLQKANSWFNCRKN

SEQ ID NO: 3448 - protein, 450 aa, Artificial Sequence
  MMP-1 variant A258T
FPATLETQEQDVDLVQKYLEKYYNLKNDGRQVEKRRNSGPVVEKLKQMQEFFGLKVTGKPDAETLKVMKQPRCGVPDVAQFVLTEGNPRWEQTHLTYRIENYTPDLPRADVDHAIEKAFQLWSNVTPLTFTKVSEGQADIMISFVRGDHRDNSPFDGPGGNLAHAFQPGPGIGGDAHFDEDERWTNNFREYNLHRVAAHELGHSLGLSHSTDIGALMYPSYTFSGDVQLAQDDIDGIQAIYGRSQNPVQPIGPQTPKTCDSKLTFDAITTIRGEVMFFKDRFYMRTNPFYPEVELNFISVFWPQLPNGLEAAYEFADRDEVRFFKGNKYWAVQGQNVLHGYPKDIYSSFGFPRTVKHIDAALSEENTGKTYFFVANKYWRYDEYKRSMDPGYPKMIAHDFPGIGHKVDAVFMKDGFFYFFHGTRQYKFDPKTKRILTLQKANSWFNCRKN

SEQ ID NO: 3449 - protein, 450 aa, Artificial Sequence
  MMP-1 variant A258Y
FPATLETQEQDVDLVQKYLEKYYNLKNDGRQVEKRRNSGPVVEKLKQMQEFFGLKVTGKPDAETLKVMKQPRCGVPDVAQFVLTEGNPRWEQTHLTYRIENYTPDLPRADVDHAIEKAFQLWSNVTPLTFTKVSEGQADIMISFVRGDHRDNSPFDGPGGNLAHAFQPGPGIGGDAHFDEDERWTNNFREYNLHRVAAHELGHSLGLSHSTDIGALMYPSYTFSGDVQLAQDDIDGIQAIYGRSQNPVQPIGPQTPKYCDSKLTFDAITTIRGEVMFFKDRFYMRTNPFYPEVELNFISVFWPQLPNGLEAAYEFADRDEVRFFKGNKYWAVQGQNVLHGYPKDIYSSFGFPRTVKHIDAALSEENTGKTYFFVANKYWRYDEYKRSMDPGYPKMIAHDFPGIGHKVDAVFMKDGFFYFFHGTRQYKFDPKTKRILTLQKANSWFNCRKN

SEQ ID NO: 3450 - protein, 450 aa, Artificial Sequence
  MMP-1 variant A258S
FPATLETQEQDVDLVQKYLEKYYNLKNDGRQVEKRRNSGPVVEKLKQMQEFFGLKVTGKPDAETLKVMKQPRCGVPDVAQFVLTEGNPRWEQTHLTYRIENYTPDLPRADVDHAIEKAFQLWSNVTPLTFTKVSEGQADIMISFVRGDHRDNSPFDGPGGNLAHAFQPGPGIGGDAHFDEDERWTNNFREYNLHRVAAHELGHSLGLSHSTDIGALMYPSYTFSGDVQLAQDDIDGIQAIYGRSQNPVQPIGPQTPKSCDSKLTFDAITTIRGEVMFFKDRFYMRTNPFYPEVELNFISVFWPQLPNGLEAAYEFADRDEVRFFKGNKYWAVQGQNVLHGYPKDIYSSFGFPRTVKHIDAALSEENTGKTYFFVANKYWRYDEYKRSMDPGYPKMIAHDFPGIGHKVDAVFMKDGFFYFFHGTRQYKFDPKTKRILTLQKANSWFNCRKN

SEQ ID NO: 3451 - protein, 450 aa, Artificial Sequence
  MMP-1 variant A258G
FPATLETQEQDVDLVQKYLEKYYNLKNDGRQVEKRRNSGPVVEKLKQMQEFFGLKVTGKPDAETLKVMKQPRCGVPDVAQFVLTEGNPRWEQTHLTYRIENYTPDLPRADVDHAIEKAFQLWSNVTPLTFTKVSEGQADIMISFVRGDHRDNSPFDGPGGNLAHAFQPGPGIGGDAHFDEDERWTNNFREYNLHRVAAHELGHSLGLSHSTDIGALMYPSYTFSGDVQLAQDDIDGIQAIYGRSQNPVQPIGPQTPKGCDSKLTFDAITTIRGEVMFFKDRFYMRTNPFYPEVELNFISVFWPQLPNGLEAAYEFADRDEVRFFKGNKYWAVQGQNVLHGYPKDIYSSFGFPRTVKHIDAALSEENTGKTYFFVANKYWRYDEYKRSMDPGYPKMIAHDFPGIGHKVDAVFMKDGFFYFFHGTRQYKFDPKTKRILTLQKANSWFNCRKN

SEQ ID NO: 3452 - protein, 450 aa, Artificial Sequence
  MMP-1 variant A258F
FPATLETQEQDVDLVQKYLEKYYNLKNDGRQVEKRRNSGPVVEKLKQMQEFFGLKVTGKPDAETLKVMKQPRCGVPDVAQFVLTEGNPRWEQTHLTYRIENYTPDLPRADVDHAIEKAFQLWSNVTPLTFTKVSEGQADIMISFVRGDHRDNSPFDGPGGNLAHAFQPGPGIGGDAHFDEDERWTNNFREYNLHRVAAHELGHSLGLSHSTDIGALMYPSYTFSGDVQLAQDDIDGIQAIYGRSQNPVQPIGPQTPKFCDSKLTFDAITTIRGEVMFFKDRFYMRTNPFYPEVELNFISVFWPQLPNGLEAAYEFADRDEVRFFKGNKYWAVQGQNVLHGYPKDIYSSFGFPRTVKHIDAALSEENTGKTYFFVANKYWRYDEYKRSMDPGYPKMIAHDFPGIGHKVDAVFMKDGFFYFFHGTRQYKFDPKTKRILTLQKANSWFNCRKN

SEQ ID NO: 3453 - protein, 450 aa, Artificial Sequence
  MMP-1 variant A258M
FPATLETQEQDVDLVQKYLEKYYNLKNDGRQVEKRRNSGPVVEKLKQMQEFFGLKVTGKPDAETLKVMKQPRCGVPDVAQFVLTEGNPRWEQTHLTYRIENYTPDLPRADVDHAIEKAFQLWSNVTPLTFTKVSEGQADIMISFVRGDHRDNSPFDGPGGNLAHAFQPGPGIGGDAHFDEDERWTNNFREYNLHRVAAHELGHSLGLSHSTDIGALMYPSYTFSGDVQLAQDDIDGIQAIYGRSQNPVQPIGPQTPKMCDSKLTFDAITTIRGEVMFFKDRFYMRTNPFYPEVELNFISVFWPQLPNGLEAAYEFADRDEVRFFKGNKYWAVQGQNVLHGYPKDIYSSFGFPRTVKHIDAALSEENTGKTYFFVANKYWRYDEYKRSMDPGYPKMIAHDFPGIGHKVDAVFMKDGFFYFFHGTRQYKFDPKTKRILTLQKANSWFNCRKN

SEQ ID NO: 3454 - protein, 450 aa, Artificial Sequence
  MMP-1 variant A258W
FPATLETQEQDVDLVQKYLEKYYNLKNDGRQVEKRRNSGPVVEKLKQMQEFFGLKVTGKPDAETLKVMKQPRCGVPDVAQFVLTEGNPRWEQTHLTYRIENYTPDLPRADVDHAIEKAFQLWSNVTPLTFTKVSEGQADIMISFVRGDHRDNSPFDGPGGNLAHAFQPGPGIGGDAHFDEDERWTNNFREYNLHRVAAHELGHSLGLSHSTDIGALMYPSYTFSGDVQLAQDDIDGIQAIYGRSQNPVQPIGPQTPKWCDSKLTFDAITTIRGEVMFFKDRFYMRTNPFYPEVELNFISVFWPQLPNGLEAAYEFADRDEVRFFKGNKYWAVQGQNVLHGYPKDIYSSFGFPRTVKHIDAALSEENTGKTYFFVANKYWRYDEYKRSMDPGYPKMIAHDFPGIGHKVDAVFMKDGFFYFFHGTRQYKFDPKTKRILTLQKANSWFNCRKN

SEQ ID NO: 3455 - protein, 450 aa, Artificial Sequence
  MMP-1 variant A258I
FPATLETQEQDVDLVQKYLEKYYNLKNDGRQVEKRRNSGPVVEKLKQMQEFFGLKVTGKPDAETLKVMKQPRCGVPDVAQFVLTEGNPRWEQTHLTYRIENYTPDLPRADVDHAIEKAFQLWSNVTPLTFTKVSEGQADIMISFVRGDHRDNSPFDGPGGNLAHAFQPGPGIGGDAHFDEDERWTNNFREYNLHRVAAHELGHSLGLSHSTDIGALMYPSYTFSGDVQLAQDDIDGIQAIYGRSQNPVQPIGPQTPKICDSKLTFDAITTIRGEVMFFKDRFYMRTNPFYPEVELNFISVFWPQLPNGLEAAYEFADRDEVRFFKGNKYWAVQGQNVLHGYPKDIYSSFGFPRTVKHIDAALSEENTGKTYFFVANKYWRYDEYKRSMDPGYPKMIAHDFPGIGHKVDAVFMKDGFFYFFHGTRQYKFDPKTKRILTLQKANSWFNCRKN

SEQ ID NO: 3456 - protein, 450 aa, Artificial Sequence
  MMP-1 variant A258V
FPATLETQEQDVDLVQKYLEKYYNLKNDGRQVEKRRNSGPVVEKLKQMQEFFGLKVTGKPDAETLKVMKQPRCGVPDVAQFVLTEGNPRWEQTHLTYRIENYTPDLPRADVDHAIEKAFQLWSNVTPLTFTKVSEGQADIMISFVRGDHRDNSPFDGPGGNLAHAFQPGPGIGGDAHFDEDERWTNNFREYNLHRVAAHELGHSLGLSHSTDIGALMYPSYTFSGDVQLAQDDIDGIQAIYGRSQNPVQPIGPQTPKVCDSKLTFDAITTIRGEVMFFKDRFYMRTNPFYPEVELNFISVFWPQLPNGLEAAYEFADRDEVRFFKGNKYWAVQGQNVLHGYPKDIYSSFGFPRTVKHIDAALSEENTGKTYFFVANKYWRYDEYKRSMDPGYPKMIAHDFPGIGHKVDAVFMKDGFFYFFHGTRQYKFDPKTKRILTLQKANSWFNCRKN

SEQ ID NO: 3457 - protein, 450 aa, Artificial Sequence
  MMP-1 variant A258L
FPATLETQEQDVDLVQKYLEKYYNLKNDGRQVEKRRNSGPVVEKLKQMQEFFGLKVTGKPDAETLKVMKQPRCGVPDVAQFVLTEGNPRWEQTHLTYRIENYTPDLPRADVDHAIEKAFQLWSNVTPLTFTKVSEGQADIMISFVRGDHRDNSPFDGPGGNLAHAFQPGPGIGGDAHFDEDERWTNNFREYNLHRVAAHELGHSLGLSHSTDIGALMYPSYTFSGDVQLAQDDIDGIQAIYGRSQNPVQPIGPQTPKLCDSKLTFDAITTIRGEVMFFKDRFYMRTNPFYPEVELNFISVFWPQLPNGLEAAYEFADRDEVRFFKGNKYWAVQGQNVLHGYPKDIYSSFGFPRTVKHIDAALSEENTGKTYFFVANKYWRYDEYKRSMDPGYPKMIAHDFPGIGHKVDAVFMKDGFFYFFHGTRQYKFDPKTKRILTLQKANSWFNCRKN

SEQ ID NO: 3458 - protein, 450 aa, Artificial Sequence
  MMP-1 variant A258P
FPATLETQEQDVDLVQKYLEKYYNLKNDGRQVEKRRNSGPVVEKLKQMQEFFGLKVTGKPDAETLKVMKQPRCGVPDVAQFVLTEGNPRWEQTHLTYRIENYTPDLPRADVDHAIEKAFQLWSNVTPLTFTKVSEGQADIMISFVRGDHRDNSPFDGPGGNLAHAFQPGPGIGGDAHFDEDERWTNNFREYNLHRVAAHELGHSLGLSHSTDIGALMYPSYTFSGDVQLAQDDIDGIQAIYGRSQNPVQPIGPQTPKPCDSKLTFDAITTIRGEVMFFKDRFYMRTNPFYPEVELNFISVFWPQLPNGLEAAYEFADRDEVRFFKGNKYWAVQGQNVLHGYPKDIYSSFGFPRTVKHIDAALSEENTGKTYFFVANKYWRYDEYKRSMDPGYPKMIAHDFPGIGHKVDAVFMKDGFFYFFHGTRQYKFDPKTKRILTLQKANSWFNCRKN

SEQ ID NO: 3459 - protein, 450 aa, Sus scrofa
  Pig MMP-1 zymogen
PAATSETQEQDVEIVQKYLKNYYNLNSDGVPVEKKRNSGLVVEKLKQMQQFFGLKVTGKPDAETLNVMKQPRCGVPDVAEFVLTPGNPRWENTHLTYRIENYTPDLSREDVDRAIEKAFQLWSNVSPLTFTKVSEGQADIMISFVRGDHRDNSPFDGPGGNLAHAFQPGPGIGGDAHFDEDERWTKNFRDYNLYRVAAHELGHSLGLSHSTDIGALMYPNYIYTGDVQLSQDDIDGIQAIYGPSENPVQPSGPQTPQVCDSKLTFDAITTLRGELMFFKDRFYMRTNSFYPEVELNFISVFWPQVPNGLQAAYEIADRDEVRFFKGNKYWAVRGQDVLYGYPKDIHRSFGFPSTVKNIDAAVFEEDTGKTYFFVAHECWRYDEYKQSMDTGYPKMIAEEFPGIGNKVDAVFQKDGFLYFFHGTRQYQFDFKTKRILTLQKANSWFNCRKN

SEQ ID NO: 3460 - protein, 450 aa, Oryctolagus cuniculus
  Rabbit MMP-1 zymogen
FPAASETQEQDVEMVQKYLENYYNLKDDWRKIPKQRGNGLAVEKLKQMQEFFGLKVTGKPDAETLKMMKQPRCGVPDVAQFVLTPGNPRWEQTHLTYRIENYTPDLSRADVDNAIEKAFQLWSNVTPLTFTKVSKGQADIMISFVRGDHRDNSPFDGPEGQLAHAFQPGLGIGGDVHFDEDDRWTKDFRNYNLYRVAAHELGHSLGLSHSTDIGALMYPNYMFSGDVQLAQDDIDGIQAIYGPSQNPSQPVGPQTPKVCDSKLTFDAITTIRGEIMFFKDRFYMRANPYYSEVELNFISVFWPHLPNGLQAAYEVAHRDEILFFKGNKYWTVQGQNELPGYPKDIHSSFGFPRSVNHIDAAVSEEDTGKTYFFVANKYWRYDEYKRSMDAGYPKMIEYDFPGIGNKVDAVFKKDGFFYFFHGTRQYKFDPKTKRILTLQKANSWFNCRKN

SEQ ID NO: 3461 - protein, 451 aa, Bos taurus
  Cow MMP-1
FPAATSETQEQDVETVKKYLENYYNLNSNGKKVERQRNGGLITEKLKQMQKFFGLRVTGKPDAETLNVMKQPRCGVPDVAPFVLTPGKSCWENTNLTYRIENYTPDLSRADVDQAIEKAFQLWSNVTPLTFTKVSEGQADIMISFVRGDHRDNSPFDGPGGNLAHAFQPGAGIGGDAHFDDDEWWTSNFQDYNLYRVAAHEFGHSLGLAHSTDIGALMYPSYTFSGDVQLSQDDIDGIQAIYGPSQNPTQPVGPQTPEVCDSKLTFDAITTIRGEVMFFKDRFYMRTNPLYPEVELNFISVFWPQLPNGLQAAYEVADRDEVRFFKGNKYWAVKGQDVLRGYPRDIYRSFGFPRTVKSIDAAVSEEDTGKTYFFVANKCWRYDEYKQSMDAGYPKMIAEDFPGIGNKVDAVFQKGGFFYFFHGRRQYKFDPQTKRILTLLKANSWFNCRKN

SEQ ID NO: 3462 - protein, 451 aa, Equus caballus
  Horse MMP-1
FPTVPSETREEDVEMVQKYLENYYNLKSDGEQIEKQRHRSPVVEKLKQMQEFFGLKVTGKPDAETLNVMKQPRCGVPDVAEFVLTEGNPRWENTHLTYRIENYTPDLPRADVDQAIEKAFQLWSNVSPLTFTKVSEGQADIMISFVRGDHRDNSPFDGPGGNLAHAFQPGPRIGGDAHFDEDETWTSNFRNYNLYRVAAHEFGHSLGLSHSTDIGALMYPNYFFTGDVQLSQDDINGIQAIYGPSQNPIQPIGPQTPEVCDSKLTFDAITTIRGEVMFFKDRFYMRINPYYPEAELNFISIFWPQLPNGLQAAYEVSHRDEVRFFKGNKYWAVKGQDVLYGYPKDIHRSFGFPSTVKNIDAAVSEEDTGKTYFFVADKYWRYDEYKRSMDAGYPKMIADDFPGIGDKVDAVFQKDGFFYFFHGTRQYKFDPKTKRILTLQKANSWFNCRKN

SEQ ID NO: 3463 - protein, 447 aa, Rattus norvegicus
  Rat MMP-1a
FPVFQDGARQNVETVWKYLENYYNLGEDVQAKNVDAKEVMAEKLRQMQQLFGLKVTGNSNSETLSAMRKPRCGVPDVAPYAITHNNPRWTKTHLTYSILNYTPYLPKEVIENAIERAFKVWSDVTPLTFERVFEEEGDIVFAFYRGDHSDNNPFDGPEYGLAHTFPPGPRLGGDVHYDLDETWTDNSDNFNLFYVTAHELGHSLGLTHSRDVGALMFPSYTWYTEDFVLNQEDINRIQALYGPSPNPIQPTGATTPHPCDGDLTFDAITTFRGEVMFFKGRFYIRVNKFMPEAELNLIGIIWPNLPGKLDAAYEVSMIDQVRYFKGNKVWVVREHTVLRGFPTDIHSFFGFPSSVTHIDAAVCEEETGKTYFFVDNMYWRYDENTQSMDPGYPRLTAEDFPGIDDKVDDVFQKGENFYFFHQSVQRRFSLRIRRVDDSRDSSTWFNC

SEQ ID NO: 3464 - protein, 447 aa, Mus musculus
  Mouse MMP-1a
FPVFHNGDRQNVETVWKYLENYYNLGKNMQAKNVNGKEMMAEKLRQMQQLFGLKVTGNSDPETLRAMKKPRCGVPDVAPYAITHNNPRWTKTHLTYSILNYTPYLPKAVVEDAIARAFRVWSDVTPLTFQRVFEEEGDIVLSFHRGDHGDNNPFDGPNYKLAHTFQPGPGLGGDVHYDLDETWTNSSENFNLFYVTAHELGHSLGLTHSSDIGALMFPSYTWYTEDFVLNQDDINRIQDLYGPSPNPIQPTGATTPHPCNGDLTFDAITTFRGEVFFFKGRFYIRVNRFMPEPELNLIGILWPNLPVKLDAAYEASMIDQVRYFKGSKVWAVQEQSVLRGFPRDIHSFFGFPSNVTHIDAAVCEEETGKTYFFVDHMYWRYDENTQSMDPGYPRLTAEDFPGIDDKVDDVFQKGENFYFFHQSVQHRFNLQIRRVDDSRDSSTWFNC

SEQ ID NO: 3465 - protein, 6 aa, Artificial Sequence
  His tag
HHHHHH

SEQ ID NO: 3466 - DNA, 5369 bp, Artificial Sequence
  pET303CTHis vector
gatctcgatcccgcgaaattaatacgactcactataggggaattgtgagcggataacaattcccctctagtaataattttgtttaactttaagaaggaggtctagaatgcatctcgagcaccaccaccaccaccactgagatccggctgctaacaaagcccgaaaggaagctgagttggctgctgccaccgctgagcaataactagcataaccccttggggcctctaaacgggtcttgaggggttttttgctgaaaggaggaactatatccggattggcgaatgggacgcgccctgtagcggcgcattaagcgcggcgggtgtggtggttacgcgcagcgtgaccgctacacttgccagcgccctagcgcccgctcctttcgctttcttcccttcctttctcgccacgttcgccggctttccccgtcaagctctaaatcgggggctccctttagggttccgatttagtgctttacggcacctcgaccccaaaaaacttgattagggtgatggttcacgtagtgggccatcgccctgatagacggtttttcgccctttgacgttggagtccacgttctttaatagtggactcttgttccaaactggaacaacactcaaccctatctcggtctattcttttgatttataagggattttgccgatttcggcctattggttaaaaaatgagctgatttaacaaaaatttaacgcgaattttaacaaaatattaacgtttacaatttcaggtggcacttttcggggaaatgtgcgcggaacccctatttgtttatttttctaaatacattcaaatatgtatccgctcatgagacaataaccctgataaatgcttcaataatattgaaaaaggaagagtatgagtattcaacatttccgtgtcgcccttattcccttttttgcggcattttgccttcctgtttttgctcacccagaaacgctggtgaaagtaaaagatgctgaagatcagttgggtgcacgagtgggttacatcgaactggatctcaacagcggtaagatccttgagagttttcgccccgaagaacgttttccaatgatgagcacttttaaagttctgctatgtggcgcggtattatcccgtattgacgccgggcaagagcaactcggtcgccgcatacactattctcagaatgacttggttgagtactcaccagtcacagaaaagcatcttacggatggcatgacagtaagagaattatgcagtgctgccataaccatgagtgataacactgcggccaacttacttctgacaacgatcggaggaccgaaggagctaaccgcttttttgcacaacatgggggatcatgtaactcgccttgatcgttgggaaccggagctgaatgaagccataccaaacgacgagcgtgacaccacgatgcctgcagcaatggcaacaacgttgcgcaaactattaactggcgaactacttactctagcttcccggcaacaattaatagactggatggaggcggataaagttgcaggaccacttctgcgctcggcccttccggctggctggtttattgctgataaatctggagccggtgagcgtgggtctcgcggtatcattgcagcactggggccagatggtaagccctcccgtatcgtagttatctacacgacggggagtcaggcaactatggatgaacgaaatagacagatcgctgagataggtgcctcactgattaagcattggtaactgtcagaccaagtttactcatatatactttagattgatttaaaacttcatttttaatttaaaaggatctaggtgaagatcctttttgataatctcatgaccaaaatcccttaacgtgagttttcgttccactgagcgtcagaccccgtagaaaagatcaaaggatcttcttgagatcctttttttctgcgcgtaatctgctgcttgcaaacaaaaaaaccaccgctaccagcggtggtttgtttgccggatcaagagctaccaactctttttccgaaggtaactggcttcagcagagcgcagataccaaatactgtccttctagtgtagccgtagttaggccaccacttcaagaactctgtagcaccgcctacatacctcgctctgctaatcctgttaccagtggctgctgccagtggcgataagtcgtgtcttaccgggttggactcaagacgatagttaccggataaggcgcagcggtcgggctgaacggggggttcgtgcacacagcccagcttggagcgaacgacctacaccgaactgagatacctacagcgtgagctatgagaaagcgccacgcttcccgaagggagaaaggcggacaggtatccggtaagcggcagggtcggaacaggagagcgcacgagggagcttccagggggaaacgcctggtatctttatagtcctgtcgggtttcgccacctctgacttgagcgtcgatttttgtgatgctcgtcaggggggcggagcctatggaaaaacgccagcaacgcggcctttttacggttcctggccttttgctggccttttgctcacatgttctttcctgcgttatcccctgattctgtggataaccgtattaccgcctttgagtgagctgataccgctcgccgcagccgaacgaccgagcgcagcgagtcagtgagcgaggaagcggaagagcgcctgatgcggtattttctccttacgcatctgtgcggtatttcacaccgcaatggtgcactctcagtacaatctgctctgatgccgcatagttaagccagtatacactccgctatcgctacgtgactgggtcatggctgcgccccgacacccgccaacacccgctgacgcgccctgacgggcttgtctgctcccggcatccgcttacagacaagctgtgaccgtctccgggagctgcatgtgtcagaggttttcaccgtcatcaccgaaacgcgcgaggcagctgcggtaaagctcatcagcgtggtcgtgaagcgattcacagatgtctgcctgttcatccgcgtccagctcgttgagtttctccagaagcgttaatgtctggcttctgataaagcgggccatgttaagggcggttttttcctgtttggtcactgatgcctccgtgtaagggggatttctgttcatgggggtaatgataccgatgaaacgagagaggatgctcacgatacgggttactgatgatgaacatgcccggttactggaacgttgtgagggtaaacaactggcggtatggatgcggcgggaccagagaaaaatcactcagggtcaatgccagcgcttcgttaatacagatgtaggtgttccacagggtagccagcagcatcctgcgatgcagatccggaacataatggtgcagggcgctgacttccgcgtttccagactttacgaaacacggaaaccgaagaccattcatgttgttgctcaggtcgcagacgttttgcagcagcagtcgcttcacgttcgctcgcgtatcggtgattcattctgctaaccagtaaggcaaccccgccagcctagccgggtcctcaacgacaggagcacgatcatgcgcacccgtggggccgccatgccggcgataatggcctgcttctcgccgaaacgtttggtggcgggaccagtgacgaaggcttgagcgagggcgtgcaagattccgaataccgcaagcgacaggccgatcatcgtcgcgctccagcgaaagcggtcctcgccgaaaatgacccagagcgctgccggcacctgtcctacgagttgcatgataaagaagacagtcataagtgcggcgacgatagtcatgccccgcgcccaccggaaggagctgactgggttgaaggctctcaagggcatcggtcgagatcccggtgcctaatgagtgagctaacttacattaattgcgttgcgctcactgcccgctttccagtcgggaaacctgtcgtgccagctgcattaatgaatcggccaacgcgcggggagaggcggtttgcgtattgggcgccagggtggtttttcttttcaccagtgagacgggcaacagctgattgcccttcaccgcctggccctgagagagttgcagcaagcggtccacgctggtttgccccagcaggcgaaaatcctgtttgatggtggttaacggcgggatataacatgagctgtcttcggtatcgtcgtatcccactaccgagatatccgcaccaacgcgcagcccggactcggtaatggcgcgcattgcgcccagcgccatctgatcgttggcaaccagcatcgcagtgggaacgatgccctcattcagcatttgcatggtttgttgaaaaccggacatggcactccagtcgccttcccgttccgctatcggctgaatttgattgcgagtgagatatttatgccagccagccagacgcagacgcgccgagacagaacttaatgggcccgctaacagcgcgatttgctggtgacccaatgcgaccagatgctccacgcccagtcgcgtaccgtcttcatgggagaaaataatactgttgatgggtgtctggtcagagacatcaagaaataacgccggaacattagtgcaggcagcttccacagcaatggcatcctggtcatccagcggatagttaatgatcagcccactgacgcgttgcgcgagaagattgtgcaccgccgctttacaggcttcgacgccgcttcgttctaccatcgacaccaccacgctggcacccagttgatcggcgcgagatttaatcgccgcgacaatttgcgacggcgcgtgcagggccagactggaggtggcaacgccaatcagcaacgactgtttgcccgccagttgttgtgccacgcggttgggaatgtaattcagctccgccatcgccgcttccactttttcccgcgttttcgcagaaacgtggctggcctggttcaccacgcgggaaacggtctgataagagacaccggcatactctgcgacatcgtataacgttactggtttcacattcaccaccctgaattgactctcttccgggcgctatcatgccataccgcgaaaggttttgcgccattcgatggtgtccgggatctcgacgctctcccttatgcgactcctgcattaggaagcagcccagtagtaggttgaggccgttgagcaccgccgccgcaaggaatggtgcatgcaaggagatggcgcccaacagtcccccggccacggggcctgccaccatacccacgccgaaacaagcgctcatgagcccgaagtggcgagcccgatcttccccatcggtgatgtcggcgatataggcgccagcaaccgcacctgtggcgccggtgatgccggccacgatgcgtccggcgtagaggatcga

SEQ ID NO: 3467 - protein, 7 aa, Artificial Sequence
  Flag tag
DYKDDDK

SEQ ID NO: 3468 - protein, 22 aa, Homo sapiens
  IgK signal sequence
MDMRVPAQLLGLLLLWLPGARG

SEQ ID NO: 3469 - protein, 435 aa, Homo sapiens
  Hyaluronidase-1 [Precursor]
MAAHLLPICALFLTLLDMAQGFRGPLLPNRPFTTVWNANTQWCLERHGVDVDVSVFDVVANPGQTFRGPDMTIFYSSQLGTYPYYTPTGEPVFGGLPQNASLIAHLARTFQDILAAIPAPDFSGLAVIDWEAWRPRWAFNWDTKDIYRQRSRALVQAQHPDWPAPQVEAVAQDQFQGAARAWMAGTLQLGRALRPRGLWGFYGFPDCYNYDFLSPNYTGQCPSGIRAQNDQLGWLWGQSRALYPSIYMPAVLEGTGKSQMYVQHRVAEAFRVAVAAGDPNLPVLPYVQIFYDTTNHFLPLDELEHSLGESAAQGAAGVVLWVSWENTRTKESCQAIKEYMDTTLGPFILNVTSGALLCSQALCSGHGRCVRRTSHPKALLLLNPASFSIQLTPGGGPLSLRGALSLEDQAQMAVEFKCRCYPGWQAPWCERKSMW

SEQ ID NO: 3470 - protein, 473 aa, Homo sapiens
  Hyaluronidase-2 [Precursor]
MRAGPGPTVTLALVLAVAWAMELKPTAPPIFTGRPFVVAWDVPTQDCGPRLKVPLDLNAFDVQASPNEGFVNQNITIFYRDRLGLYPRFDSAGRSVHGGVPQNVSLWAHRKMLQKRVEHYIRTQESAGLAVIDWEDWRPVWVRNWQDKDVYRRLSRQLVASRHPDWPPDRIVKQAQYEFEFAAQQFMLETLRYVKAVRPRHLWGFYLFPDCYNHDYVQNWESYTGRCPDVEVARNDQLAWLWAESTALFPSVYLDETLASSRHGRNFVSFRVQEALRVARTHHANHALPVYVFTRPTYSRRLTGLSEMDLISTIGESAALGAAGVILWGDAGYTTSTETCQYLKDYLTRLLVPYVVNVSWATQYCSRAQCHGHGRCVRRNPSASTFLHLSTNSFRLVPGHAPGEPQLRPVGELSWADIDHLQTHFRCQCYLGWSGEQCQWDHRQAAGGASEAWAGSHLTSLLALAALAFTWTL

SEQ ID NO: 3471 - protein, 417 aa, Homo sapiens
  Hyaluronidase-3 [Precursor]
MTTQLGPALVLGVALCLGCGQPLPQVPERPFSVLWNVPSAHCEARFGVHLPLNALGIIANRGQHFHGQNMTIFYKNQLGLYPYFGPRGTAHNGGIPQALPLDRHLALAAYQIHHSLRPGFAGPAVLDWEEWCPLWAGNWGRRRAYQAASWAWAQQVFPDLDPQEQLYKAYTGFEQAARALMEDTLRVAQALRPHGLWGFYHYPACGNGWHSMASNYTGRCHAATLARNTQLHWLWAASSALFPSIYLPPRLPPAHHQAFVRHRLEEAFRVALVGHRHPLPVLAYVRLTHRRSGRFLSQDDLVQSIGVSAALGAAGVVLWGDLSLSSSEEECWHLHDYLVDTLGPYVINVTRAAMACSHQRCHGHGRCARRDPGQMEAFLHLWPDGSLGDWKSFSCHCYWGWAGPTCQEPRPGPKEAV

SEQ ID NO: 3472 - protein, 481 aa, Homo sapiens
  Hyaluronidase-4
MKVLSEGQLKLCVVQPVHLTSWLLIFFILKSISCLKPARLPIYQRKPFIAAWNAPTDQCLIKYNLRLNLKMFPVIGSPLAKARGQNVTIFYVNRLGYYPWYTSQGVPINGGLPQNISLQVHLEKADQDINYYIPAEDFSGLAVIDWEYWRPQWARNWNSKDVYRQKSRKLISDMGKNVSATDIEYLAKVTFEESAKAFMKETIKLGIKSRPKGLWGYYLYPDCHNYNVYAPNYSGSCPEDEVLRNNELSWLWNSSAALYPSIGVWKSLGDSENILRFSKFRVHESMRISTMTSHDYALPVFVYTRLGYRDEPLFFLSKQDLVSTIGESAALGAAGIVIWGDMNLTASKANCTKVKQFVSSDLGSYIANVTRAAEVCSLHLCRNNGRCIRKMWNAPSYLHLNPASYHIEASEDGEFTVKGKASDTDLAVMADTFSCHCYQGYEGADCREIKTADGCSGVSPSPGSLMTLCLLLLASYRSIQL

SEQ ID NO: 3473 - protein, 509 aa, Homo sapiens
  precursor PH20
MGVLKFKHIFFRSFVKSSGVSQIVFTFLLIPCCLTLNFRAPPVIPNVPFLWAWNAPSEFCLGKFDEPLDMSLFSFIGSPRINATGQGVTIFYVDRLGYYPYIDSITGVTVNGGIPQKISLQDHLDKAKKDITFYMPVDNLGMAVIDWEEWRPTWARNWKPKDVYKNRSIELVQQQNVQLSLTEATEKAKQEFEKAGKDFLVETIKLGKLLRPNHLWGYYLFPDCYNHHYKKPGYNGSCFNVEIKRNDDLSWLWNESTALYPSIYLNTQQSPVAATLYVRNRVREAIRVSKIPDAKSPLPVFAYTRIVFTDQVLKFLSQDELVYTFGETVALGASGIVIWGTLSIMRSMKSCLLLDNYMETILNPYIINVTLAAKMCSQVLCQEQGVCIRKNWNSSDYLHLNPDNFAIQLEKGGKFTVRGKPTLEDLEQFSEKFYCSCYSTLSCKEKADVKDTDAVDVCIADGVCIDAFLKPPMETEEPQIFYNASPSTLSATMFIVSILFLIISSVASL

SEQ ID NO: 3474 - DNA, 6630 bp, Homo sapiens
  HZ24 with PH20 and DHFR (Gen1/Gen2)
tcaatattggccattagccatattattcattggttatatagcataaatcaatattggctattggccattgcatacgttgtatctatatcataatatgtacatttatattggctcatgtccaatatgaccgccatgttggcattgattattgactagttattaatagtaatcaattacggggtcattagttcatagcccatatatggagttccgcgttacataacttacggtaaatggcccgcctggctgaccgcccaacgacccccgcccattgacgtcaataatgacgtatgttcccatagtaacgccaatagggactttccattgacgtcaatgggtggagtatttacggtaaactgcccacttggcagtacatcaagtgtatcatatgccaagtccgccccctattgacgtcaatgacggtaaatggcccgcctggcattatgcccagtacatgaccttacgggactttcctacttggcagtacatctacgtattagtcatcgctattaccatggtgatgcggttttggcagtacaccaatgggcgtggatagcggtttgactcacggggatttccaagtctccaccccattgacgtcaatgggagtttgttttggcaccaaaatcaacgggactttccaaaatgtcgtaataaccccgccccgttgacgcaaatgggcggtaggcgtgtacggtgggaggtctatataagcagagctcgtttagtgaaccgtcagatcactagaagctttattgcggtagtttatcacagttaaattgctaacgcagtcagtgcttctgacacaacagtctcgaacttaagctgcagaagttggtcgtgaggcactgggcaggtaagtatcaaggttacaagacaggtttaaggagaccaatagaaactgggcttgtcgagacagagaagactcttgcgtttctgataggcacctattggtcttactgacatccactttgcctttctctccacaggtgtccactcccagttcaattacagctcttaaggctagagtacttaatacgactcactataggctagcatgggagtgctaaaattcaagcacatctttttcagaagctttgttaaatcaagtggagtatcccagatagttttcaccttccttctgattccatgttgcttgactctgaatttcagagcacctcctgttattccaaatgtgcctttcctctgggcctggaatgccccaagtgaattttgtcttggaaaatttgatgagccactagatatgagcctcttctctttcataggaagcccccgaataaacgccaccgggcaaggtgttacaatattttatgttgatagacttggctactatccttacatagattcaatcacaggagtaactgtgaatggaggaatcccccagaagatttccttacaagaccatctggacaaagctaagaaagacattacattttatatgccagtagacaatttgggaatggctgttattgactgggaagaatggagacccacttgggcaagaaactggaaacctaaagatgtttacaagaataggtctattgaattggttcagcaacaaaatgtacaacttagtctcacagaggccactgagaaagcaaaacaagaatttgaaaaggcagggaaggatttcctggtagagactataaaattgggaaaattacttcggccaaatcacttgtggggttattatctttttccggattgttacaaccatcactataagaaacccggttacaatggaagttgcttcaatgtagaaataaaaagaaatgatgatctcagctggttgtggaatgaaagcactgctctttacccatccatttatttgaacactcagcagtctcctgtagctgctacactctatgtgcgcaatcgagttcgggaagccatcagagtttccaaaatacctgatgcaaaaagtccacttccggtttttgcatatacccgcatagtttttactgatcaagttttgaaattcctttctcaagatgaacttgtgtatacatttggcgaaactgttgctctgggtgcttctggaattgtaatatggggaaccctcagtataatgcgaagtatgaaatcttgcttgctcctagacaattacatggagactatactgaatccttacataatcaacgtcacactagcagccaaaatgtgtagccaagtgctttgccaggagcaaggagtgtgtataaggaaaaactggaattcaagtgactatcttcacctcaacccagataattttgctattcaacttgagaaaggtggaaagttcacagtacgtggaaaaccgacacttgaagacctggagcaattttctgaaaaattttattgcagctgttatagcaccttgagttgtaaggagaaagctgatgtaaaagacactgatgctgttgatgtgtgtattgctgatggtgtctgtatagatgcttttctaaaacctcccatggagacagaagaacctcaaattttctactgaggatccatagctaacgcccctctccctcccccccccctaacgttactggccgaagccgcttggaataaggccggtgtgcgtttgtctatatgttattttccaccatattgccgtcttttggcaatgtgagggcccggaaacctggccctgtcttcttgacgagcattcctaggggtctttcccctctcgccaaaggaatgcaaggtctgttgaatgtcgtgaaggaagcagttcctctggaagcttcttgaagacaaacaacgtctgtagcgaccctttgcaggcagcggaaccccccacctggcgacaggtgcctctgcggccaaaagccacgtgtataagatacacctgcaaaggcggcacaaccccagtgccacgttgtgagttggatagttgtggaaagagtcaaatggctctcctcaagcgtattcaacaaggggctgaaggatgcccagaaggtaccccattgtatgggatctgatctggggcctcggtgcacatgctttacatgtgtttagtcgaggttaaaaaaacgtctaggccccccgaaccacggggacgtggttttcctttgaaaaacacgatgataagcttgccacaacccacagcggccgctgccatcatggttcgaccattgaactgcatcgtcgccgtgtcccaaaatatggggattggcaagaacggagacctaccctggcctccgctcaggaacgagttcaagtacttccaaagaatgaccacaacctcttcagtggaaggtaaacagaatctggtgattatgggtaggaaaacctggttctccattcctgagaagaatcgacctttaaaggacagaattaatatagttctcagtagagaactcaaagaaccaccacgaggagctcattttcttgccaaaagtttggatgatgccttaagacttattgaacaaccggaattggcaagtaaagtagacatggtttggatagtcggaggcagttctgtttaccaggaagccatgaatcaaccaggccacctcagactctttgtgacaaggatcatgcaggaatttgaaagtgacacgtttttcccagaaattgatttggggaaatataaacttctcccagaatacccaggcgtcctctctgaggtccaggaggaaaaaggcatcaagtataagtttgaagtctacgagaagaaagactaaacgcgtggtacctctagagtcgacccgggcggccgcttcgagcagacatgataagatacattgatgagtttggacaaaccacaactagaatgcagtgaaaaaaatgctttatttgtgaaatttgtgatgctattgctttatttgtaaccattataagctgcaataaacaagttaacaacaacaattgcattcattttatgtttcaggttcagggggagatgtgggaggttttttaaagcaagtaaaacctctacaaatgtggtaaaatcgataaggatccgggctggcgtaatagcgaagaggcccgcaccgatcgcccttcccaacagttgcgcagcctgaatggcgaatggacgcgccctgtagcggcgcattaagcgcggcgggtgtggtggttacgcgcagcgtgaccgctacacttgccagcgccctagcgcccgctcctttcgctttcttcccttcctttctcgccacgttcgccggctttccccgtcaagctctaaatcgggggctccctttagggttccgatttagtgctttacggcacctcgaccccaaaaaacttgattagggtgatggttcacgtagtgggccatcgccctgatagacggtttttcgccctttgacgttggagtccacgttctttaatagtggactcttgttccaaactggaacaacactcaaccctatctcggtctattcttttgatttataagggattttgccgatttcggcctattggttaaaaaatgagctgatttaacaaaaatttaacgcgaattttaacaaaatattaacgcttacaatttcctgatgcggtattttctccttacgcatctgtgcggtatttcacaccgcatatggtgcactctcagtacaatctgctctgatgccgcatagttaagccagccccgacacccgccaacacccgctgacgcgccctgacgggcttgtctgctcccggcatccgcttacagacaagctgtgaccgtctccgggagctgcatgtgtcagaggttttcaccgtcatcaccgaaacgcgcgagacgaaagggcctcgtgatacgcctatttttataggttaatgtcatgataataatggtttcttagacgtcaggtggcacttttcggggaaatgtgcgcggaacccctatttgtttatttttctaaatacattcaaatatgtatccgctcatgagacaataaccctgataaatgcttcaataatattgaaaaaggaagagtatgagtattcaacatttccgtgtcgcccttattcccttttttgcggcattttgccttcctgtttttgctcacccagaaacgctggtgaaagtaaaagatgctgaagatcagttgggtgcacgagtgggttacatcgaactggatctcaacagcggtaagatccttgagagttttcgccccgaagaacgttttccaatgatgagcacttttaaagttctgctatgtggcgcggtattatcccgtattgacgccgggcaagagcaactcggtcgccgcatacactattctcagaatgacttggttgagtactcaccagtcacagaaaagcatcttacggatggcatgacagtaagagaattatgcagtgctgccataaccatgagtgataacactgcggccaacttacttctgacaacgatcggaggaccgaaggagctaaccgcttttttgcacaacatgggggatcatgtaactcgccttgatcgttgggaaccggagctgaatgaagccataccaaacgacgagcgtgacaccacgatgcctgtagcaatggcaacaacgttgcgcaaactattaactggcgaactacttactctagcttcccggcaacaattaatagactggatggaggcggataaagttgcaggaccacttctgcgctcggcccttccggctggctggtttattgctgataaatctggagccggtgagcgtgggtctcgcggtatcattgcagcactggggccagatggtaagccctcccgtatcgtagttatctacacgacggggagtcaggcaactatggatgaacgaaatagacagatcgctgagataggtgcctcactgattaagcattggtaactgtcagaccaagtttactcatatatactttagattgatttaaaacttcatttttaatttaaaaggatctaggtgaagatcctttttgataatctcatgaccaaaatcccttaacgtgagttttcgttccactgagcgtcagaccccgtagaaaagatcaaaggatcttcttgagatcctttttttctgcgcgtaatctgctgcttgcaaacaaaaaaaccaccgctaccagcggtggtttgtttgccggatcaagagctaccaactctttttccgaaggtaactggcttcagcagagcgcagataccaaatactgttcttctagtgtagccgtagttaggccaccacttcaagaactctgtagcaccgcctacatacctcgctctgctaatcctgttaccagtggctgctgccagtggcgataagtcgtgtcttaccgggttggactcaagacgatagttaccggataaggcgcagcggtcgggctgaacggggggttcgtgcacacagcccagcttggagcgaacgacctacaccgaactgagatacctacagcgtgagctatgagaaagcgccacgcttcccgaagggagaaaggcggacaggtatccggtaagcggcagggtcggaacaggagagcgcacgagggagcttccagggggaaacgcctggtatctttatagtcctgtcgggtttcgccacctctgacttgagcgtcgatttttgtgatgctcgtcaggggggcggagcctatggaaaaacgccagcaacgcggcctttttacggttcctggccttttgctggccttttgctcacatggctcgacagatct

SEQ ID NO: 3475 - protein, 482 aa, Homo sapiens
  precursor soluble rHuPH20
MGVLKFKHIFFRSFVKSSGVSQIVFTFLLIPCCLTLNFRAPPVIPNVPFLWAWNAPSEFCLGKFDEPLDMSLFSFIGSPRINATGQGVTIFYVDRLGYYPYIDSITGVTVNGGIPQKISLQDHLDKAKKDITFYMPVDNLGMAVIDWEEWRPTWARNWKPKDVYKNRSIELVQQQNVQLSLTEATEKAKQEFEKAGKDFLVETIKLGKLLRPNHLWGYYLFPDCYNHHYKKPGYNGSCFNVEIKRNDDLSWLWNESTALYPSIYLNTQQSPVAATLYVRNRVREAIRVSKIPDAKSPLPVFAYTRIVFTDQVLKFLSQDELVYTFGETVALGASGIVIWGTLSIMRSMKSCLLLDNYMETILNPYIINVTLAAKMCSQVLCQEQGVCIRKNWNSSDYLHLNPDNFAIQLEKGGKFTVRGKPTLEDLEQFSEKFYCSCYSTLSCKEKADVKDTDAVDVCIADGVCIDAFLKPPMETEEPQIFY

SEQ ID NO: 3476 - protein, 447 aa, Homo sapiens [sequence omitted]

SEQ ID NO: 3477 - protein, 446 aa, Homo sapiens
  soluble rHuPH20 1-446
LNFRAPPVIPNVPFLWAWNAPSEFCLGKFDEPLDMSLFSFIGSPRINATGQGVTIFYVDRLGYYPYIDSITGVTVNGGIPQKISLQDHLDKAKKDITFYMPVDNLGMAVIDWEEWRPTWARNWKPKDVYKNRSIELVQQQNVQLSLTEATEKAKQEFEKAGKDFLVETIKLGKLLRPNHLWGYYLFPDCYNHHYKKPGYNGSCFNVEIKRNDDLSWLWNESTALYPSIYLNTQQSPVAATLYVRNRVREAIRVSKIPDAKSPLPVFAYTRIVFTDQVLKFLSQDELVYTFGETVALGASGIVIWGTLSIMRSMKSCLLLDNYMETILNPYIINVTLAAKMCSQVLCQEQGVCIRKNWNSSDYLHLNPDNFAIQLEKGGKFTVRGKPTLEDLEQFSEKFYCSCYSTLSCKEKADVKDTDAVDVCIADGVCIDAFLKPPMETEEPQIF

SEQ ID NO: 3478 - protein, 445 aa, Homo sapiens
  soluble rHuPH20 1-445
LNFRAPPVIPNVPFLWAWNAPSEFCLGKFDEPLDMSLFSFIGSPRINATGQGVTIFYVDRLGYYPYIDSITGVTVNGGIPQKISLQDHLDKAKKDITFYMPVDNLGMAVIDWEEWRPTWARNWKPKDVYKNRSIELVQQQNVQLSLTEATEKAKQEFEKAGKDFLVETIKLGKLLRPNHLWGYYLFPDCYNHHYKKPGYNGSCFNVEIKRNDDLSWLWNESTALYPSIYLNTQQSPVAATLYVRNRVREAIRVSKIPDAKSPLPVFAYTRIVFTDQVLKFLSQDELVYTFGETVALGASGIVIWGTLSIMRSMKSCLLLDNYMETILNPYIINVTLAAKMCSQVLCQEQGVCIRKNWNSSDYLHLNPDNFAIQLEKGGKFTVRGKPTLEDLEQFSEKFYCSCYSTLSCKEKADVKDTDAVDVCIADGVCIDAFLKPPMETEEPQI

SEQ ID NO: 3479 - protein, 444 aa, Homo sapiens
  soluble rHuPH20 1-444
LNFRAPPVIPNVPFLWAWNAPSEFCLGKFDEPLDMSLFSFIGSPRINATGQGVTIFYVDRLGYYPYIDSITGVTVNGGIPQKISLQDHLDKAKKDITFYMPVDNLGMAVIDWEEWRPTWARNWKPKDVYKNRSIELVQQQNVQLSLTEATEKAKQEFEKAGKDFLVETIKLGKLLRPNHLWGYYLFPDCYNHHYKKPGYNGSCFNVEIKRNDDLSWLWNESTALYPSIYLNTQQSPVAATLYVRNRVREAIRVSKIPDAKSPLPVFAYTRIVFTDQVLKFLSQDELVYTFGETVALGASGIVIWGTLSIMRSMKSCLLLDNYMETILNPYIINVTLAAKMCSQVLCQEQGVCIRKNWNSSDYLHLNPDNFAIQLEKGGKFTVRGKPTLEDLEQFSEKFYCSCYSTLSCKEKADVKDTDAVDVCIADGVCIDAFLKPPMETEEPQ

SEQ ID NO: 3480 - protein, 443 aa, Homo sapiens
  soluble rHuPH20 1-443
LNFRAPPVIPNVPFLWAWNAPSEFCLGKFDEPLDMSLFSFIGSPRINATGQGVTIFYVDRLGYYPYIDSITGVTVNGGIPQKISLQDHLDKAKKDITFYMPVDNLGMAVIDWEEWRPTWARNWKPKDVYKNRSIELVQQQNVQLSLTEATEKAKQEFEKAGKDFLVETIKLGKLLRPNHLWGYYLFPDCYNHHYKKPGYNGSCFNVEIKRNDDLSWLWNESTALYPSIYLNTQQSPVAATLYVRNRVREAIRVSKIPDAKSPLPVFAYTRIVFTDQVLKFLSQDELVYTFGETVALGASGIVIWGTLSIMRSMKSCLLLDNYMETILNPYIINVTLAAKMCSQVLCQEQGVCIRKNWNSSDYLHLNPDNFAIQLEKGGKFTVRGKPTLEDLEQFSEKFYCSCYSTLSCKEKADVKDTDAVDVCIADGVCIDAFLKPPMETEEP

SEQ ID NO: 3481 - protein, 442 aa, Homo sapiens
  soluble rHuPH20 1-442
LNFRAPPVIPNVPFLWAWNAPSEFCLGKFDEPLDMSLFSFIGSPRINATGQGVTIFYVDRLGYYPYIDSITGVTVNGGIPQKISLQDHLDKAKKDITFYMPVDNLGMAVIDWEEWRPTWARNWKPKDVYKNRSIELVQQQNVQLSLTEATEKAKQEFEKAGKDFLVETIKLGKLLRPNHLWGYYLFPDCYNHHYKKPGYNGSCFNVEIKRNDDLSWLWNESTALYPSIYLNTQQSPVAATLYVRNRVREAIRVSKIPDAKSPLPVFAYTRIVFTDQVLKFLSQDELVYTFGETVALGASGIVIWGTLSIMRSMKSCLLLDNYMETILNPYIINVTLAAKMCSQVLCQEQGVCIRKNWNSSDYLHLNPDNFAIQLEKGGKFTVRGKPTLEDLEQFSEKFYCSCYSTLSCKEKADVKDTDAVDVCIADGVCIDAFLKPPMETEE

SEQ ID NO: 3482 - protein, 450 aa, Bos taurus
  hyaluronidase
MRPFSLEVSLHLPWAMAAHLLPVCTLFLNLLSMTQGSRDPVVPNQPFTTIWNANTEWCMKKHGVDVDISIFDVVTNPGQTFRGPNMTIFYSSQLGTYPYYTSAGEPVFGGLPQNASLNAHLARTFQDILAAMPEPRFSGLAVIDWEAWRPRWAFNWDTKDIYRQRSRALVQKQHPDWLAPRVEAAAQDQFEGAAEEWMAGTLKLGQALRPQGLWGFYNFPECYNYDFKSPNYTGRCPLNICAQNDQLGWLWGQSRALYPSIYLPAALEGTKKTQMFVQHRVAEAFRVAAGAGDPKLPVLPYMQLFYDMTNHFLPAEELEHSLGESAAQGAAGVVLWVSWLSTSTKESCQAIKEYVDTTLGPSILNVTSGARLCSQVLCSGHGRCARRPSYPKARLILNSTSFSIKPTPGGGPLTLQGALSLEDRLRMAVEFECRCYRGWRGTRCEQWGMW

SEQ ID NO: 3483 - protein, 331 aa, Vespula vulgaris
  hyaluronidase A
SERPKRVFNIYWNVPTFMCHQYDLYFDEVTNFNIKRNSKDDFQGDKIAIFYDPGEFPALLSLKDGKYKKRNGGVPQEGNITIHLQKFIENLDKIYPNRNFSGIGVIDFERWRPIFRQNWGNMKIHKNFSIDLVRNEHPTWNKKMIELEASKRFEKYARFFMEETLKLAKKTRKQADWGYYGYPYCFNMSPNNLVPECDVTAMHENDKMSWLFNNQNVLLPSVYVRQELTPDQRIGLVQGRVKEAVRISNNLKHSPKVLSYWWYVYQDETNTFLTETDVKKTFQEIVINGGDGIIIWGSSSDVNSLSKCKRLQDYLLTVLGPIAINVTEAVN

SEQ ID NO: 3484 - protein, 340 aa, Vespula vulgaris
  hyaluronidase B
DRTIWPKKGFSIYWNIPTHFCHNFGVYFKELKQFNIKYNSMNNFRGETISLFYDPGNFPSMVLLKNGTYEIRNEGVPQKGNLTIHLEQFTKELDEIYPKKIAGGIGVIHFHNWRPIFRRNVDNLKINKDISIDLVRKEHPKWDKSMIEKEASNRFETSAKIFMEKTLKLAKEIRKKTEWGYHGYPHCLSGSTDKPSFDCDALSMSENDKMSWLFNNQNVLLPSIYLKNVLKPDEKIHLVQERLKEAIRISKNFKHLPKVLPYWWYTYQDKESIFLTEADVKNTFKEILTNGADGIIIWGVSYELTDRKRCEKLKEYLMKILGPIAFKVTKAVKENTPLNF

SEQ ID NO: 3485 - protein, 382 aa, Apis mellifera
  hyaluronidase
MSRPLVITEGMMIGVLLMLAPINALLLGFVQSTPDNNKTVREFNVYWNVPTFMCHKYGLRFEEVSEKYGILQNWMDKFRGEEIAILYDPGMFPALLKDPNGNVVARNGGVPQLGNLTKHLQVFRDHLINQIPDKSFPGVGVIDFESWRPIFRQNWASLQPYKKLSVEVVRREHPFWDDQRVEQEAKRRFEKYGQLFMEETLKAAKRMRPAANWGYYAYPYCYNLTPNQPSAQCEATTMQENDKMSWLFESEDVLLPSVYLRWNLTSGERVGLVGGRVKEALRIARQMTTSRKKVLPYYWYKYQDRRDTDLSRADLEATLRKITDLGADGFIIWGSSDDINTKAKCLQFREYLNNELGPAVKRIALNNNANDRLTVDVSVDQV

SEQ ID NO: 3486 - protein, 331 aa, Dolichovespula maculata
  hyaluronidase
SERPKRVFNIYWNVPTFMCHQYGLYFDEVTNFNIKHNSKDDFQGDKISIFYDPGEFPALLPLKEGNYKIRNGGVPQEGNITIHLQRFIENLDKTYPNRNFNGIGVIDFERWRPIFRQNWGNMMIHKKFSIDLVRNEHPFWDKKMIELEASKRFEKYARLFMEETLKLAKKTRKQADWGYYGYPYCFNMSPNNLVPDCDATAMLENDKMSWLFNNQNVLLPSVYIRHELTPDQRVGLVQGRVKEAVRISNNLKHSPKVLSYWWYVYQDDTNTFLTETDVKKTFQEIAINGGDGIIIWGSSSDVNSLSKCKRLREYLLTVLGPITVNVTETVN

SEQ ID NO: 3487 - protein, 367 aa, Polistes annularis
  hyaluronidase
YVSLSPDSVFNIITDDISHQILSRSNCERSKRPKRVFSIYWNVPTFMCHQYGMNFDEVTDFNIKHNSKDNFRGETISIYYDPGKFPALMPLKNGNYEERNGGVPQRGNITIHLQQFNEDLDKMTPDKNFGGIGVIDFERWKPIFRQNWGNTEIHKKYSIELVRKEHPKWSESMIEAEATKKFEKYARYFMEETLKLAKKTRKRAKWGYYGFPYCYNVTPNNPGPDCDAKATIENDRLSWMYNNQEILFPSVYVRHEQKPEERVYLVQGRIKEAVRISNNLEHSPSVLAYWWYVYQDKMDIYLSETDVEKTFQEIVTNGGDGIIIWGSSSDVNSLSKCKRLREYLLNTLGPFAVNVTETVNGRSSLNF

SEQ ID NO: 3488 - protein, 462 aa, Mus musculus
  hyaluronidase
MLGLTQHAQKVWRMKPFSPEVSPGSSPATAGHLLRISTLFLTLLELAQVCRGSVVSNRPFITVWNGDTHWCLTEYGVDVDVSVFDVVANKEQSFQGSNMTIFYREELGTYPYYTPTGEPVFGGLPQNASLVTHLAHTFQDIKAAMPEPDFSGLAVIDWEAWRPRWAFNWDSKDIYRQRSMELVQAEHPDWPETLVEAAAKNQFQEAAEAWMAGTLQLGQVLRPRGLWGYYGFPDCYNNDFLSLNYTGQCPVFVRDQNDQLGWLWNQSYALYPSIYLPAALMGTGKSQMYVRHRVQEALRVAIVSRDPHVPVMPYVQIFYEMTDYLLPLEELEHSLGESAAQGVAGAVLWLSSDKTSTKESCQAIKAYMDSTLGPFIVNVTSAALLCSEALCSGHGRCVRHPSYPEALLTLNPASFSIELTHDGRPPSLKGTLSLKDRAQMAMKFRCRCYRGWRGKWCDKRGM

SEQ ID NO: 3489 - protein, 473 aa, Mus musculus
  hyaluronidase 2
MRAGLGPIITLALVLEVAWAGELKPTAPPIFTGRPFVVAWNVPTQECAPRHKVPLDLRAFDVKATPNEGFFNQNITTFYYDRLGLYPRFDAAGTSVHGGVPQNGSLCAHLPMLKESVERYIQTQEPGGLAVIDWEEWRPVWVRNWQEKDVYRQSSRQLVASRHPDWPSDRVMKQAQYEFEFAARQFMLNTLRYVKAVRPQHLWGFYLFPDCYNHDYVQNWESYTGRCPDVEVARNDQLAWLWAESTALFPSVYLDETLASSVHSRNFVSFRVREALRVAHTHHANHALPVYVFTRPTYTRGLTGLSQVDLISTIGESAALGSAGVIFWGDSEDASSMETCQYLKNYLTQLLVPYIVNVSWATQYCSWTQCHGHGRCVRRNPSANTFLHLNASSFRLVPGHTPSEPQLRPEGQLSEADLNYLQKHFRCQCYLGWGGEQCQRNYKGAAGNASRAWAGSHLTSLLGLVAVALTWTL

SEQ ID NO: 3490 - protein, 412 aa, Mus musculus
  hyaluronidase 3
MIMHLGLMMVVGLTLCLMHGQALLQVPEHPFSVVWNVPSARCKAHFGVHLPLDALGIVANHGQHFHGQNISIFYKNQFGLYPYFGPRGTAHNGGIPQAVSLDHHLARAAHQILHSLGSSFAGLAVLDWEEWYPLWAGNWGPHRQVYLAASWVWTQQMFPGLDPQEQLHKAHTSFEQAARALMEYTLQLGRTLRPSGLWGFYRYPACGNGWHKMASNYTGHCHAAITTQNTQLRWLWAASSALFPSIYLPPRLPLAYRQAFVRHRLEEAFRVALLEHSHPLPVLAYSRLTHRSSGRFLSLDDLMQTIGVSAALGTAGVVLWGDLSFSSSEEKCWRLHDYLVGTLGPYVINVTKADMACSHQRCHGHGRCARKDPGQMEAFLHLQPDDSLGAWNSFRCHCYSGWAGPTCLEPKP

SEQ ID NO: 3491 - protein, 435 aa, Sus scrofa
  hyaluronidase
MAAHLLPICTLFLNLLSVAQGSRDPVVLNRPFTTIWNANTQWCLKRHGVDVDVSVFEVVVNPGQTFRGPNMTIFYSSQLGTYPYYTSAGEPVFGGLPQNASLDVHLNRTFKDILAAMPESNFSGLAVIDWEAWRPRWAFNWDAKDIYRQRSRALVQKQHPDWPAPWVEAAAQDQFQEAAQTWMAGTLKLGQTLRPHGLWGFYGFPDCYNYDFQSSNYTGQCPPGVSAQNDQLGWLWGQSRALYPSIYLPSALEGTNKTQLYVQHRVNEAFRVAAAAGDPNLPVLPYAQIFHDMTNRLLSREELEHSLGESAAQGAAGVVLWVSWENTRTKESCQSIKEYVDTTLGPFILNVTSGALLCSQAVCSGHGRCVRRPSHTEALPILNPSSFSIKPTPGGGPLTLQGALSLKDRVQMAEEFQCRCYPGWRGTWCEQQGTR

SEQ ID NO: 3492 - protein, 419 aa, Sus scrofa
  hyaluronidase 3
MTMQLGLALVLGVAMCLGCGQPLLRAPERPFCVLWNVPSARCKARFGVHLPLEALGITANHGQRFHGQNITIFYKSQLGLYPYFGPRGTAHNGGIPQAVSLDHHLARAAYQIHRSLRPGFTGLAVLDWEEWCPLWAGNWGRRQAYQAASCAWAQRVYPNLDPQEQLCKARAGFEEAARALMEDTLRLGRMLRPHGLWGFYHYPACGNGWHGTASNYTGHCHAAALARNTQLYWLWAASSALFPSIYLPPGLPPAYHQAFVRYRLEEAFRVALVGHPHPLPVLAYARLTHRNSGRFLSQDELVQTIGVSAALGASGVVLWGDLSFSSSEEECWHLRGYLVGTLGPYVINVTRAAMACSHQRCHGHGRCAWQDPGQLKVFLHLHPGGSPGAWESFSCRCYWGWAGPTCQEPRPELGPEEAT

SEQ ID NO: 3493 - protein, 449 aa, Rattus norvegicus
  hyaluronidase 1
MKPFSPEVSPDPCPATAAHLLRTYTLFLTLLELAQGCRGSMVSNRPFITVWNADTHWCLKDHGVDVDVSVFDVVANKEQNFQGPNMTIFYREELGTYPYYTPTGEPVFGGLPQNASLVTHLAHAFQDIKAAMPEPDFSGLAVIDWEAWRPRWAFNWDSKDIYQQRSMELVRAEHPDWPETLVEAEAQGQFQEAAEAWMAGTLQLGQVLRPRGLWGYYGFPDCYNYDFLSPNYTGQCSLSIHDQNDQLGWLWNQSYALYPSIYLPAALMGTGKSQMYVRYRVQEAFRLALVSRDPHVPIMPYVQIFYEKTDYLLPLEELEHSLGESAAQGAAGAVLWISSEKTSTKESCQAIKAYMDSTLGPFILNVTSAALLCSEALCSGRGRCVRHPSYPEALLTLSPASFSIEPTHDGRPLSLKGTLSLKDRAQMAMKFKCRCYRGWSGEWCKKQDM

SEQ ID NO: 3494 - protein, 473 aa, Rattus norvegicus
  hyaluronidase 2
MRAGLGPIITLALVLEVAWASELKPTAPPIFTGRPFVVAWNVPTQECAPRHKVPLDLRAFDVEATPNEGFFNQNITTFYYDRLGLYPRFDAAGMSVHGGVPQNGSLCAHLPMLKEAVERYIQTQEPAGLAVIDWEEWRPVWVRNWQEKDVYRQSSRQLVASRHPDWPSDRIVKQAQYEFEFAARQFMLNTLRYVKAVRPQHLWGFYLFPDCYNHDYVQNWDSYTGRCPDVEVAQNDQLAWLWAENTALFPSVYLDKTLASSKHSRNFVSFRVQEALRVAHTHHANHALPVYVFTRPTYTRRLTELNQMDLISTIGESAALGSAGVIFWGDSVYASSMENCQNLKKYLTQTLVPYIVNVSWATQYCSWTQCHGHGRCVRRNPSASTFLHLSPSSFRLVPGRTPSEPQLRPEGELSEDDLSYLQMHFRCHCYLGWGGEQCQWNHKRAAGDASRAWAGAHLASLLGLVAMTLTWTL

SEQ ID NO: 3495 - protein, 412 aa, Rattus norvegicus
  hyaluronidase 3
MITQLGLTLVVGLTLCLVHVQALLQVPEFPFSVLWNVPSARCKTRFGVHLPLDALGIIANHGQRFHGQNITIFYKNQFGLYPYFGPRGTAHNGGIPQAVSLDHHLAQAAHQILHNLGSSFAGLAVLDWEEWYPLWAGNWGTHRQVYQAASWAWAQQMFPDLNPQEQLHKAQTGFEQAARALMEHTLRLGQMLRPHGLWGFYRYPVCGNGWHNMASNYTGHCHPAIITRNTQLRWLWAASSALFPSIYLPPRLPPAYHQTFVRHRLEEAFRVALTGHAHPLPVLAYVRLTHRSSGRFLSLDDLMQTIGVSAALGAAGVVLWGDLSVSSSEEECWRLHDYLVGTLGPYVINVTKAATACSHQRCHGHGRCSWKDPGQMEAFLHLQPDDNLGAWKSFRCRCYLGWSGPTCLEPKP

SEQ ID NO: 3496 - protein, 545 aa, Oryctolagus cuniculus
  PH20
MGVLKFKHIFFGSAVELSGVFQIVFIFLLIPCCLTANFRAPPVIPNVPFLWAWNAPTEFCLGKSGEPLDMSLFSLFGSPRKNKTGQGITIFYVDRLGYYPYIDPHTGAIVHGRIPQLGPLQQHLTKLRQEILYYMPKDNVGLAVIDWEEWLPTWLRNWKPKDIYRIKSIELVKSQHPQYNHSYATEKAKRDFEKAGKDFMEETLKLGRLLRPNHLWGYYLFPDCYNHHYDKPNLYKGSCFDIEKKRNDDLSWLWKESTALFPSVYLTSRARSATALSKLYVVRNRVHEAIRVSKIPDDKSPLPNFVYTRLVFTDQIFQFLSHHDLVYTIGEIVALGASGIVVWGSQSLARSMKSCLHLDNYMKTILNPYLINVTLAAKMCNQVLCQEQGVCTRKNWNPNDYLHLNPGNFAIQLGSNGTYKVDGKPTLTDLEQFSKNFQCSCYTNLNCKERTDMNNVRTVNVCAVENVCIDTNVGPQAVTYAPKEKKDVAHILSNTTSINSSTTMSLPFPRKHVSGCLLVLCMYSQYLNICYRLVAIGIQHGYYLK

SEQ ID NO: 3497 - protein, 476 aa, Ovis aries
  hyaluronidase 2
MWTGLGPAVTLALVLVVAWATELKPTAPPIFTGRPFVVAWDVPTQDCGPRHKMPLDPKDMKAFDVQASPNEGFVNQNITIFYRDRLGMYPHFNSVGRSVHGGVPQNGSLWVHLEMLKGHVEHYIRTQEPAGLAVIDWEDWRPVWVRNWQDKDVYRRLSRQLVASHHPDWPPERIVKEAQYEFEFAARQFMLETLRFVKAFRPRHLWGFYLFPDCYNHDYVQNWETYTGRCPDVEVSRNDQLSWLWAESTALFPSVYLEETLASSTHGRNFVSFRVQEALRVADVHHANHALPVYVFTRPTYSRGLTGLSEMDLISTIGESAALGAAGVILWGDAGFTTSNETCRRLKDYLTRSLVPYVVNVSWAAQYCSWAQCHGHGRCVRRDPNAHTFLHLSASSFRLVPSHAPDEPRLRPEGELSWADRNHLQTHFRCQCYLGWGGEQCQWDRRRAAGGASGAWAGSHLTGLLAVAVLAFTWTS

SEQ ID NO: 3498 - protein, 414 aa, Pongo pygmaeus
  hyaluronidase 3
MTTRLGPALVLGVALCLGCGQPLPQVPERPFSVLWNVPSAHCKSRFGVHLPLNALGIIANRGQHFHGQNMTIFYKNQLGLYPYFGPKGTAHNGGIPQALPLDRHLALAAYQIHHSLRPGFAGPAVLDWEEWCPLWAGNWGRRRAYQAASWAWAQQVFPDLDPQEQLYKAYTGFEQAARALMEDTLRVAQALRPHGLWGFYHYPACGNGWHSMASNYTGRCHAATLARNTQLHWLWAASSALFPSIYLPPRLPPAHHQAFVRHRLEEAFRVALVGHLPVLAYVRLTHRRSGRFLSQDDLVQTIGVSAALGAAGVVLWGDLSLSSSEEECWHLHDYLVDTLGPYGINVTRAAMACSHQRCHGHGRCARRDPGQMEAFLHLWPDGSLGDWKSFSCHCYWGWAGPTCQEPRLGPKEAV

SEQ ID NO: 3499 - protein, 510 aa, Macaca fascicularis
  PH20
MGVLKFKHIFFRSFVKSSGVSQIVFTFLLIPCCLTLNFRAPPIIPNVPFLWAWNAPSEFCLGKFNEPLDMSLFTLMGSPRINVTGQGVTIFYVDRLGYYPYIDLTTGVTVHGGIPQKVSLQDHLDKSKQDILFYMPVDNLGMAVIDWEEWRPTWARNWKPKDVYKNRSIELVQQQNVQLSLPQATDKAKQEFEKAGKDFMLETIKLGRSLRPNHLWGYYLFPDCYNHHYRKPGYNGSCFDVEIKRNDDLSWLWNESTALYPSIYLNTQQSVVVATLYVRNRVREAIRVSKIPDAKNPLPVFVYARLVFTDQVLKFLSREELVSTLGETVALGASGIVIWGSLSITRSMKSCLLLDTYMETILNPYIINVTLAAKMCSQVLCQEQGVCIRKDWNSSDYLHLNPDNFDIRLEKGGKFTVHGKPTVEDLEEFSEKFYCSCYTNLSCKEKADVKDTDAVDVCIADGVCIDASLKPPVETEGSPPIFYNTSSSTVSTTMFIVNILFLIISSVASL

SEQ ID NO: 3500 - protein, 529 aa, Cavia porcellus
  PH20
MGAFTFKHSFFGSFVECSGVLQTVFIFLLIPCCLADKRAPPLIPNVPLLWVWNAPTEFCIGGTNQPLDMSFFSIVGTPRKNITGQSITLYYVDRLGYYPYIDPHTGAIVHGGLPQLMNLQQHLRKSRQDILFYMPTDSVGLAVIDWEEWRPTWTRNWRPKDIYRNKSIELVKSQHPQYNHSYAVAVAKRDFERTGKAFMLETLKLGKSLRPSSLWGYYLFPDCYNTHFTKPNYDGHCPPIELQRNNDLQWLWNDSTALYPSVYLTSRVRSSQNGALYVRNRVHESIRVSKLMDDKNPLPIYVYIRLVFTDQTTTFLELDDLVHSVGEIVPLGVSGIIIWGSLSLTRSLVSCIGLENYMKGTLLPYLINVTLAAKMCGQVLCKNQGICTRKDWNTNTYLHLNATNFDIELQQNGKFVVHGKPSLEDLQEFSKNFHCSCYTNVACKDRLDVHNVRSVNVCTANNICIDAVLNFPSLDDDDEPPITDDTSQNQDSISDITSSAPPSSHILPKDLSWCLFLLSIFSQHWKYLL

SEQ ID NO: 3501 - protein, 512 aa, Rattus norvegicus
  PH20
MGELQFKWLFWRSFAESGGTFQTVLIFLFIPYSLTVDYRATPVLSDTTFVWVWNVPTEACVENVTEPIDLSFFSLIGSPRKTAIGQPVTLFYVDRLGNYPHIDAQQTEHHGGIPQKGDLTTHLVKAKEDVERYIPTDKLGLAIIDWEEWRPTWMRNWTPKDIYRNKSIELVQAADPAINITEATVRAKAQFEGAAKEFMEGTLKLGKHIRPKHLWGFYLFPDCYNNKFQVDNYDGQCPDVEKKRNDDLDWLWKESTGLYPSVYLKKDLKSSRKATLYVRYRVLESIRVSKVSDESNPVPIFVYIRLVFTDHVSEYLLEDDLVNTIGEIVAQGTSGIIIWDAMSLAQRSAGCPILRQYMKTTLNPYIVNVTLAAKMCSQTLCKEKGMCSRKTESSDAYLHLDPSSFSINVTEAGKYEVLGKPEVKDLEYFSEHFKCSCFSKMTCEETSDMRSIQDVNVCMGDNVCIKATLGPNSAFHLLPGKGLLLMTTLAHILHHLPHDIFVFPWKMLVSTP

SEQ ID NO: 3502 - protein, 512 aa, Mus musculus
  PH20
MGELRFKHLFWGSFVESGGTFQTVLIFLLIPCSLTVDYRAAPILSNTTFLWIWNVPTERCVGNVNDPIDLSFFSLIGSPRKTATGQPVTLFYVDRLGLYPHIDANQAEHYGGIPQRGDYQAHLRKAKTDIEHYIPDDKLGLAIIDWEEWRPTWLRNWKPKDNYRNKSIELVQSTNPGLSITEATQKAIQQFEEAGRKFMEGTLHLGKFLRPNQLWGYYLFPDCYNNKFQDPKYDGQCPAVEKKRNDNLKWLWKASTGLYPSVYLKKDLKSNRQATLYVRYRVVEAIRVSKVGNASDPVPIFVYIRLVFTDRTSEYLLEDDLVNTIGEIVALGTSGIIIWDAMSLAQRAAGCPILHKYMQTTLNPYIVNVTLAAKMCSQTLCNEKGMCSRRKESSDVYLHLNPSHFDIMLTETGKYEVLGNPRVGDLEYFSEHFKCSCFSRMTCKETSDVKNVQDVNVCVGDNVCIKAKVEPNPAFYLLPGKSLLFMTTLGHVLYHLPQDIFVFPRKTLVSTP

SEQ ID NO: 3503 - protein, 807 aa, Staphylococcus aureus
  hyaluronidase
MTYRIKKWQKLSTITLLMAGVITLNGGEFRSVDKHQIAVADTNVQTPDYEKLRNTWLDVNYGYDKYDENNPDMKKKFDATEKEATNLLKEMKTESGRKYLWSGAETLETNSSHMTRTYRNIEKIAEAMRNPKTTLNTDENKKKVKDALEWLHKNAYGKEPDKKVKELSENFTKTTGKNTNLNWWDYEIGTPKSLTNTLILLNDQFSNEEKKKFTAPIKTFAPDSDKILSSVGKAELAKGGNLVDISKVKLLECIIEEDKDMMKKSIDSFNKVFTYVQDSATGKERNGFYKDGSYIDHQDVPYTGAYGVVLLEGISQMMPMIKETPFNDKTQNDTTLKSWIDDGFMPLIYKGEMMDLSRGRAISRENETSHSASATVMKSLLRLSDAMDDSTKAKYKKIVKSSVESDSSYKQNDYLNSYSDIDKMKSLMTDNSISKNGLTQQLKIYNDMDRVTYHNKDLDFAFGLSMTSKNVARYESINGENLKGWHTGAGMSYLYNSDVKHYHDNFWVTADMKRLSGTTTLDNEILKDTDDKKSSKTFVGGTKVDDQHASIGMDFENQDKTLTAKKSYFILNDKIVFLGTGIKSTDSSKNPVTTIENRKANGYTLYTDDKQTTNSDNQENNSVFLESTDTKKNIGYHFLNKPKITVKKESHTGKWKEINKSQKDTQKTDEYYEVTQKHSNSDNKYGYVLYPGLSKDVFKTKKDEVTVVKQEDDFHVVKDNESVWAGVNYSNSTQTFDINNTKVEVKAKGMFILKKKDDNTYECSFYNPESTNSASDIESKISMTGYSITNKNTSTSNESGVHFELTK

SEQ ID NO: 3504 - protein, 371 aa, Streptococcus pyogenes
  bacteriophage H4489A hyaluronidase
MTENIPLRVQFKRMSADEWARSDVILLEGEIGFETDTGFAKFGDGQNTFSKLKYLTGPKGPKGDTGLQGKTGGTGPRGPAGKPGTTDYDQLQNKPDLGAFAQKEETNSKITKLESSKADKSAVYSKAESKIELDKKLSLTGGIVTGQLQFKPNKSGIKPSSSVGGAINIDMSKSEGAAMVMYTNKDTTDGPLMILRSDKDTFDQSAQFVDYSGKTNAVNIVMRQPSAPNFSSALNITSANEGGSAMQIRGVEKALGTLKITHENPNVEAKYDENAAALSIDIVKKQKGGKGTAAQGIYINSTSGTAGKMLRIRNKNEDKFYVGPDGGFHSGANSTVAGNLTVKDPTSGKHAATKDYVDEKIAELKKLILKK

SEQ ID NO: 3505 - protein, 1628 aa, Clostridium perfringens
  hyaluronidase
MNKNIRKIITSTVLAAMTISVLPSNLVVFATDGITENFYEIYPKPQEISYSGGEFQISDEINIVYDDGIDTYTKKRVDEVLEASNLEATVSNEIVPGKTNFLVGINESGGVVDNYFNKNIPHDESFFDEKMDANIVSVKDGVIGVIGEDTDSAFYGVTTLKHVFNQLEEGNKIQSFRADDYAEVAHRGFIEGYYGNPWSNEDRAELMKFGGDYKLNQYVFAPKDDPYHNSKWRDLYPEEKLSEIKKLAQVGNETKNRYVYALHPFMNNPVRFDTEENYQNDLGVIKAKFTQLLENDVRQFAILADDASAPAQGASMYVKLLTDLTRWLEEQQSTYPDLKTDLMFCPSDYYGNGSSAQLKELNKAEDNVSIVMTGGRIWGEVDENFANNFMNNISTEGHPGRAPFFWINWPCSDNSKQHLIMGGNDTFLHPGVDPSKIDGIVLNPMQQAEANKSALFAIADYAWNIWDNKEEADENWNDSFKYMDHGTAEETNSSLALREISKHMINQNMDGRVRPLQESVELAPKLEAFKQKYDSGASIKEDALELIAEFTNLQKAADYYKNNPGNERTRDQIIYWLNCWEDTMDAAIGYLKSAIAIEEGDDEAAWANYSEAQGAFEKSKTYGFHYVDHTEYAEVGVQHIVPFIKSMGQNLSVVIGSIVDPNRIIATYISNRQDAPTGNPDNIFDNNASTELVYKNPNRIDVGTYVGVKYSNPITLNNVEFLMGANSNPNDTMQKAKIQYTVDGREWIDLEEGVEYTMPGAIKVENLDLKVRGVRLIATEARENTWLGVRDINVNKKEDSNSGVEFNPSLIRSESWQVYEGNEANLLDGDDNTGVWYKTLNGDTSLAGEFIGLDLGKEIKLDGIRFVIGKNGGGSSDKWNKFKLEYSLDNESWTTIKEYDKTGAPAGKDVIEESFETPISAKYIRLTNMENINKWLTFSEFAIISDELENAGNKENVYTNTELDLLSLAKEDVTKLIPTDDISLNHGEYIGVKLNRIKDLSNINLEISNDTGLKLQSSMNGVEWTEITDKNTLEDGRYVRLINTSNEAVNFNLTKFEVNSNEVYEPSLVDAYVGDDGAKKAVDGDLKTRVKFLGAPSTGDTIVYDLGQEILVDNLKYVVLDTEVDHVRDGKIQLSLDGETWTDAITIGDGVENGVDDMFSTPLKNGYKHGNQSGGIVPIDSAYVEGDNLNQKARYVRILFTAPYRHRWTVINELMINNGEYISTVNDPTYISNPIEERGFAPSNLRDGNLTTSYKPNTNNGEISEGSITYRLSEKTDVRKVTIVQSGSSISNAKVMARVGDGSENVTDQWVQLGTLSNSLNEFINRDYNNIYEIKIEWTDVAPNIYEIITLNQEFEFPVNDSLKAKYDELINLSGDEYTLSSFETLKEALNEAKSILDDSNSSQKKIDKALEKLNKAEERLDLRATDFEDFNKVLTLGNSLVEEEYTAESWALFSEVLEAANEANKNKADYTQDQINQIVIDLDASIKALVKETPEVDKTNLGELINQGKSLLDESVEGFNVGEYHKGAKDGLTVEINKAEEVFNKEDATEEEINLAKESLEGAIARFNSLLIEESTGDFNGNGKIDIGDLAMVSKNIGSTTNTSLDLNKDGSIDEYEISFINHRILN

SEQ ID NO: 3506 - protein, 450 aa, Homo sapiens
  allelic variants of MMP-1
  VARIANT 4, 10, 254: Xaa = Pro
  VARIANT 30: Xaa = Met or Ser
  VARIANT 96: Xaa = Arg
  VARIANT 114, 172: Xaa = Val
  VARIANT 166: Xaa = Cys
  VARIANT 181: Xaa = His
  VARIANT 189, 298, 387: Xaa = Thr
  VARIANT 200, 286, 432: Xaa = Ala
  VARIANT 214: Xaa = Glu
  VARIANT 232: Xaa = Asn
  VARIANT 233, 314: Xaa = Gly
  VARIANT 243, 315, 391: Xaa = Ser
  VARIANT 374: Xaa = Met
  VARIANT 386: Xaa = Gln
FPAXLETQEXDVDLVQKYLEKYYNLKNDGXQVEKRRNSGPVVEKLKQMQEFFGLKVTGKPDAETLKVMKQPRCGVPDVAQFVLTEGNPRWEQTHLXYRIENYTPDLPRADVDHXIEKAFQLWSNVTPLTFTKVSEGQADIMISFVRGDHRDNSPFDGPGGNLAHAXQPGPGXGGDAHFDEXERWTNNFXEYNLHRVAAHXLGHSLGLSHSTDIXALMYPSYTFSGDVQLAQXXIDGIQAIYGXSQNPVQPIGPXTPKACDSKLTFDAITTIRGEVMFFKDRFYMRXNPFYPEVELNFXSVFWPQLPNGLEAAYXXADRDEVRFFKGNKYWAVQGQNVLHGYPKDIYSSFGFPRTVKHIDAALSEENTGKTYFFXANKYWRYDEYKXXMDPXYPKMIAHDFPGIGHKVDAVFMKDGFFYFFHGTRQYKFDPKXKRILTLQKANSWFNCRKN

SEQ ID NO: 3507 - protein, 450 aa, Artificial Sequence
  MMP-1 variant D156K/G159V/D179N
FPATLETQEQDVDLVQKYLEKYYNLKNDGRQVEKRRNSGPVVEKLKQMQEFFGLKVTGKPDAETLKVMKQPRCGVPDVAQFVLTEGNPRWEQTHLTYRIENYTPDLPRADVDHAIEKAFQLWSNVTPLTFTKVSEGQADIMISFVRGDHRDNSPFKGPVGNLAHAFQPGPGIGGDAHFNEDERWTNNFREYNLHRVAAHELGHSLGLSHSTDIGALMYPSYTFSGDVQLAQDDIDGIQAIYGRSQNPVQPIGPQTPKACDSKLTFDAITTIRGEVMFFKDRFYMRTNPFYPEVELNFISVFWPQLPNGLEAAYEFADRDEVRFFKGNKYWAVQGQNVLHGYPKDIYSSFGFPRTVKHIDAALSEENTGKTYFFVANKYWRYDEYKRSMDPGYPKMIAHDFPGIGHKVDAVFMKDGFFYFFHGTRQYKFDPKTKRILTLQKANSWFNCRKN

SEQ ID NO: 3508 - protein, 450 aa, Artificial Sequence
  MMP-1 variant R150P/V227E
FPATLETQEQDVDLVQKYLEKYYNLKNDGRQVEKRRNSGPVVEKLKQMQEFFGLKVTGKPDAETLKVMKQPRCGVPDVAQFVLTEGNPRWEQTHLTYRIENYTPDLPRADVDHAIEKAFQLWSNVTPLTFTKVSEGQADIMISFVRGDHPDNSPFDGPGGNLAHAFQPGPGIGGDAHFDEDERWTNNFREYNLHRVAAHELGHSLGLSHSTDIGALMYPSYTFSGDEQLAQDDIDGIQAIYGRSQNPVQPIGPQTPKACDSKLTFDAITTIRGEVMFFKDRFYMRTNPFYPEVELNFISVFWPQLPNGLEAAYEFADRDEVRFFKGNKYWAVQGQNVLHGYPKDIYSSFGFPRTVKHIDAALSEENTGKTYFFVANKYWRYDEYKRSMDPGYPKMIAHDFPGIGHKVDAVFMKDGFFYFFHGTRQYKFDPKTKRILTLQKANSWFNCRKN

SEQ ID NO: 3509 - protein, 450 aa, Artificial Sequence
  MMP-1 variant D156T/V227E
FPATLETQEQDVDLVQKYLEKYYNLKNDGRQVEKRRNSGPVVEKLKQMQEFFGLKVTGKPDAETLKVMKQPRCGVPDVAQFVLTEGNPRWEQTHLTYRIENYTPDLPRADVDHAIEKAFQLWSNVTPLTFTKVSEGQADIMISFVRGDHRDNSPFTGPGGNLAHAFQPGPGIGGDAHFDEDERWTNNFREYNLHRVAAHELGHSLGLSHSTDIGALMYPSYTFSGDEQLAQDDIDGIQAIYGRSQNPVQPIGPQTPKACDSKLTFDAITTIRGEVMFFKDRFYMRTNPFYPEVELNFISVFWPQLPNGLEAAYEFADRDEVRFFKGNKYWAVQGQNVLHGYPKDIYSSFGFPRTVKHIDAALSEENTGKTYFFVANKYWRYDEYKRSMDPGYPKMIAHDFPGIGHKVDAVFMKDGFFYFFHGTRQYKFDPKTKRILTLQKANSWFNCRKN

SEQ ID NO: 3510 - protein, 450 aa, Artificial Sequence
  MMP-1 variant G159V/A198L
FPATLETQEQDVDLVQKYLEKYYNLKNDGRQVEKRRNSGPVVEKLKQMQEFFGLKVTGKPDAETLKVMKQPRCGVPDVAQFVLTEGNPRWEQTHLTYRIENYTPDLPRADVDHAIEKAFQLWSNVTPLTFTKVSEGQADIMISFVRGDHRDNSPFDGPVGNLAHAFQPGPGIGGDAHFDEDERWTNNFREYNLHRVALHELGHSLGLSHSTDIGALMYPSYTFSGDVQLAQDDIDGIQAIYGRSQNPVQPIGPQTPKACDSKLTFDAITTIRGEVMFFKDRFYMRTNPFYPEVELNFISVFWPQLPNGLEAAYEFADRDEVRFFKGNKYWAVQGQNVLHGYPKDIYSSFGFPRTVKHIDAALSEENTGKTYFFVANKYWRYDEYKRSMDPGYPKMIAHDFPGIGHKVDAVFMKDGFFYFFHGTRQYKFDPKTKRILTLQKANSWFNCRKN

SEQ ID NO: 3511 - protein, 449 aa, Artificial Sequence
  MMP-1 variant D105N/A198L
PATLETQEQDVDLVQKYLEKYYNLKNDGRQVEKRRNSGPVVEKLKQMQEFFGLKVTGKPDAETLKVMKQPRCGVPDVAQFVLTEGNPRWEQTHLTYRIENYTPNLPRADVDHAIEKAFQLWSNVTPLTFTKVSEGQADIMISFVRGDHRDNSPFDGPGGNLAHAFQPGPGIGGDAHFDEDERWTNNFREYNLHRVALHELGHSLGLSHSTDIGALMYPSYTFSGDVQLAQDDIDGIQAIYGRSQNPVQPIGPQTPKACDSKLTFDAITTIRGEVMFFKDRFYMRTNPFYPEVELNFISVFWPQLPNGLEAAYEFADRDEVRFFKGNKYWAVQGQNVLHGYPKDIYSSFGFPRTVKHIDAALSEENTGKTYFFVANKYWRYDEYKRSMDPGYPKMIAHDFPGIGHKVDAVFMKDGFFYFFHGTRQYKFDPKTKRILTLQKANSWFNCRKN

SEQ ID NO: 3512 - protein, 450 aa, Artificial Sequence
  MMP-1 variant D179N/V227E
FPATLETQEQDVDLVQKYLEKYYNLKNDGRQVEKRRNSGPVVEKLKQMQEFFGLKVTGKPDAETLKVMKQPRCGVPDVAQFVLTEGNPRWEQTHLTYRIENYTPDLPRADVDHAIEKAFQLWSNVTPLTFTKVSEGQADIMISFVRGDHRDNSPFDGPGGNLAHAFQPGPGIGGDAHFNEDERWTNNFREYNLHRVAAHELGHSLGLSHSTDIGALMYPSYTFSGDEQLAQDDIDGIQAIYGRSQNPVQPIGPQTPKACDSKLTFDAITTIRGEVMFFKDRFYMRTNPFYPEVELNFISVFWPQLPNGLEAAYEFADRDEVRFFKGNKYWAVQGQNVLHGYPKDIYSSFGFPRTVKHIDAALSEENTGKTYFFVANKYWRYDEYKRSMDPGYPKMIAHDFPGIGHKVDAVFMKDGFFYFFHGTRQYKFDPKTKRILTLQKANSWFNCRKN

SEQ ID NO: 3513 - protein, 450 aa, Artificial Sequence
  MMP-1 variant A198L/V227E
FPATLETQEQDVDLVQKYLEKYYNLKNDGRQVEKRRNSGPVVEKLKQMQEFFGLKVTGKPDAETLKVMKQPRCGVPDVAQFVLTEGNPRWEQTHLTYRIENYTPDLPRADVDHAIEKAFQLWSNVTPLTFTKVSEGQADIMISFVRGDHRDNSPFDGPGGNLAHAFQPGPGIGGDAHFDEDERWTNNFREYNLHRVALHELGHSLGLSHSTDIGALMYPSYTFSGDEQLAQDDIDGIQAIYGRSQNPVQPIGPQTPKACDSKLTFDAITTIRGEVMFFKDRFYMRTNPFYPEVELNFISVFWPQLPNGLEAAYEFADRDEVRFFKGNKYWAVQGQNVLHGYPKDIYSSFGFPRTVKHIDAALSEENTGKTYFFVANKYWRYDEYKRSMDPGYPKMIAHDFPGIGHKVDAVFMKDGFFYFFHGTRQYKFDPKTKRILTLQKANSWFNCRKN

SEQ ID NO: 3514 - protein, 450 aa, Artificial Sequence
  MMP-1 variant E180T/V227E
FPATLETQEQDVDLVQKYLEKYYNLKNDGRQVEKRRNSGPVVEKLKQMQEFFGLKVTGKPDAETLKVMKQPRCGVPDVAQFVLTEGNPRWEQTHLTYRIENYTPDLPRADVDHAIEKAFQLWSNVTPLTFTKVSEGQADIMISFVRGDHRDNSPFDGPGGNLAHAFQPGPGIGGDAHFDTDERWTNNFREYNLHRVAAHELGHSLGLSHSTDIGALMYPSYTFSGDEQLAQDDIDGIQAIYGRSQNPVQPIGPQTPKACDSKLTFDAITTIRGEVMFFKDRFYMRTNPFYPEVELNFISVFWPQLPNGLEAAYEFADRDEVRFFKGNKYWAVQGQNVLHGYPKDIYSSFGFPRTVKHIDAALSEENTGKTYFFVANKYWRYDEYKRSMDPGYPKMIAHDFPGIGHKVDAVFMKDGFFYFFHGTRQYKFDPKTKRILTLQKANSWFNCRKN

SEQ ID NO: 3515 - protein, 450 aa, Artificial Sequence
  MMP-1 variant D179N/A198L
FPATLETQEQDVDLVQKYLEKYYNLKNDGRQVEKRRNSGPVVEKLKQMQEFFGLKVTGKPDAETLKVMKQPRCGVPDVAQFVLTEGNPRWEQTHLTYRIENYTPDLPRADVDHAIEKAFQLWSNVTPLTFTKVSEGQADIMISFVRGDHRDNSPFDGPGGNLAHAFQPGPGIGGDAHFNEDERWTNNFREYNLHRVALHELGHSLGLSHSTDIGALMYPSYTFSGDVQLAQDDIDGIQAIYGRSQNPVQPIGPQTPKACDSKLTFDAITTIRGEVMFFKDRFYMRTNPFYPEVELNFISVFWPQLPNGLEAAYEFADRDEVRFFKGNKYWAVQGQNVLHGYPKDIYSSFGFPRTVKHIDAALSEENTGKTYFFVANKYWRYDEYKRSMDPGYPKMIAHDFPGIGHKVDAVFMKDGFFYFFHGTRQYKFDPKTKRILTLQKANSWFNCRKN

SEQ ID NO: 3516 - protein, 450 aa, Artificial Sequence
  MMP-1 variant D156K/D179N
FPATLETQEQDVDLVQKYLEKYYNLKNDGRQVEKRRNSGPVVEKLKQMQEFFGLKVTGKPDAETLKVMKQPRCGVPDVAQFVLTEGNPRWEQTHLTYRIENYTPDLPRADVDHAIEKAFQLWSNVTPLTFTKVSEGQADIMISFVRGDHRDNSPFKGPGGNLAHAFQPGPGIGGDAHFNEDERWTNNFREYNLHRVAAHELGHSLGLSHSTDIGALMYPSYTFSGDVQLAQDDIDGIQAIYGRSQNPVQPIGPQTPKACDSKLTFDAITTIRGEVMFFKDRFYMRTNPFYPEVELNFISVFWPQLPNGLEAAYEFADRDEVRFFKGNKYWAVQGQNVLHGYPKDIYSSFGFPRTVKHIDAALSEENTGKTYFFVANKYWRYDEYKRSMDPGYPKMIAHDFPGIGHKVDAVFMKDGFFYFFHGTRQYKFDPKTKRILTLQKANSWFNCRKN

SEQ ID NO: 3517 - protein, 450 aa, Artificial Sequence
  MMP-1 variant D105N/R150P/D156K/ G159V/D179N/E180T
FPATLETQEQDVDLVQKYLEKYYNLKNDGRQVEKRRNSGPVVEKLKQMQEFFGLKVTGKPDAETLKVMKQPRCGVPDVAQFVLTEGNPRWEQTHLTYRIENYTPNLPRADVDHAIEKAFQLWSNVTPLTFTKVSEGQADIMISFVRGDHPDNSPFKGPVGNLAHAFQPGPGIGGDAHFNTDERWTNNFREYNLHRVAAHELGHSLGLSHSTDIGALMYPSYTFSGDVQLAQDDIDGIQAIYGRSQNPVQPIGPQTPKACDSKLTFDAITTIRGEVMFFKDRFYMRTNPFYPEVELNFISVFWPQLPNGLEAAYEFADRDEVRFFKGNKYWAVQGQNVLHGYPKDIYSSFGFPRTVKHIDAALSEENTGKTYFFVANKYWRYDEYKRSMDPGYPKMIAHDFPGIGHKVDAVFMKDGFFYFFHGTRQYKFDPKTKRILTLQKANSWFNCRKN

SEQ ID NO: 3518 - protein, 450 aa, Artificial Sequence
  MMP-1 variant D105N/R150P/E180T
FPATLETQEQDVDLVQKYLEKYYNLKNDGRQVEKRRNSGPVVEKLKQMQEFFGLKVTGKPDAETLKVMKQPRCGVPDVAQFVLTEGNPRWEQTHLTYRIENYTPNLPRADVDHAIEKAFQLWSNVTPLTFTKVSEGQADIMISFVRGDHPDNSPFDGPGGNLAHAFQPGPGIGGDAHFDTDERWTNNFREYNLHRVAAHELGHSLGLSHSTDIGALMYPSYTFSGDVQLAQDDIDGIQAIYGRSQNPVQPIGPQTPKACDSKLTFDAITTIRGEVMFFKDRFYMRTNPFYPEVELNFISVFWPQLPNGLEAAYEFADRDEVRFFKGNKYWAVQGQNVLHGYPKDIYSSFGFPRTVKHIDAALSEENTGKTYFFVANKYWRYDEYKRSMDPGYPKMIAHDFPGIGHKVDAVFMKDGFFYFFHGTRQYKFDPKTKRILTLQKANSWFNCRKN

SEQ ID NO: 3519 - protein, 450 aa, Artificial Sequence
  MMP-1 variant G159V/I240S
FPATLETQEQDVDLVQKYLEKYYNLKNDGRQVEKRRNSGPVVEKLKQMQEFFGLKVTGKPDAETLKVMKQPRCGVPDVAQFVLTEGNPRWEQTHLTYRIENYTPDLPRADVDHAIEKAFQLWSNVTPLTFTKVSEGQADIMISFVRGDHRDNSPFDGPVGNLAHAFQPGPGIGGDAHFDEDERWTNNFREYNLHRVAAHELGHSLGLSHSTDIGALMYPSYTFSGDVQLAQDDIDGIQASYGRSQNPVQPIGPQTPKACDSKLTFDAITTIRGEVMFFKDRFYMRTNPFYPEVELNFISVFWPQLPNGLEAAYEFADRDEVRFFKGNKYWAVQGQNVLHGYPKDIYSSFGFPRTVKHIDAALSEENTGKTYFFVANKYWRYDEYKRSMDPGYPKMIAHDFPGIGHKVDAVFMKDGFFYFFHGTRQYKFDPKTKRILTLQKANSWFNCRKN

SEQ ID NO: 3520 - protein, 450 aa, Artificial Sequence
  MMP-1 variant D156T/D179N/I240S
FPATLETQEQDVDLVQKYLEKYYNLKNDGRQVEKRRNSGPVVEKLKQMQEFFGLKVTGKPDAETLKVMKQPRCGVPDVAQFVLTEGNPRWEQTHLTYRIENYTPDLPRADVDHAIEKAFQLWSNVTPLTFTKVSEGQADIMISFVRGDHRDNSPFTGPGGNLAHAFQPGPGIGGDAHFNEDERWTNNFREYNLHRVAAHELGHSLGLSHSTDIGALMYPSYTFSGDVQLAQDDIDGIQASYGRSQNPVQPIGPQTPKACDSKLTFDAITTIRGEVMFFKDRFYMRTNPFYPEVELNFISVFWPQLPNGLEAAYEFADRDEVRFFKGNKYWAVQGQNVLHGYPKDIYSSFGFPRTVKHIDAALSEENTGKTYFFVANKYWRYDEYKRSMDPGYPKMIAHDFPGIGHKVDAVFMKDGFFYFFHGTRQYKFDPKTKRILTLQKANSWFNCRKN

SEQ ID NO: 3521 - protein, 450 aa, Artificial Sequence
  MMP-1 variant D156T/G159V
FPATLETQEQDVDLVQKYLEKYYNLKNDGRQVEKRRNSGPVVEKLKQMQEFFGLKVTGKPDAETLKVMKQPRCGVPDVAQFVLTEGNPRWEQTHLTYRIENYTPDLPRADVDHAIEKAFQLWSNVTPLTFTKVSEGQADIMISFVRGDHRDNSPFTGPVGNLAHAFQPGPGIGGDAHFDEDERWTNNFREYNLHRVAAHELGHSLGLSHSTDIGALMYPSYTFSGDVQLAQDDIDGIQAIYGRSQNPVQPIGPQTPKACDSKLTFDAITTIRGEVMFFKDRFYMRTNPFYPEVELNFISVFWPQLPNGLEAAYEFADRDEVRFFKGNKYWAVQGQNVLHGYPKDIYSSFGFPRTVKHIDAALSEENTGKTYFFVANKYWRYDEYKRSMDPGYPKMIAHDFPGIGHKVDAVFMKDGFFYFFHGTRQYKFDPKTKRILTLQKANSWFNCRKN

SEQ ID NO: 3522 - protein, 450 aa, Artificial Sequence
  MMP-1 variant R150P/E180T
FPATLETQEQDVDLVQKYLEKYYNLKNDGRQVEKRRNSGPVVEKLKQMQEFFGLKVTGKPDAETLKVMKQPRCGVPDVAQFVLTEGNPRWEQTHLTYRIENYTPDLPRADVDHAIEKAFQLWSNVTPLTFTKVSEGQADIMISFVRGDHPDNSPFDGPGGNLAHAFQPGPGIGGDAHFDTDERWTNNFREYNLHRVAAHELGHSLGLSHSTDIGALMYPSYTFSGDVQLAQDDIDGIQAIYGRSQNPVQPIGPQTPKACDSKLTFDAITTIRGEVMFFKDRFYMRTNPFYPEVELNFISVFWPQLPNGLEAAYEFADRDEVRFFKGNKYWAVQGQNVLHGYPKDIYSSFGFPRTVKHIDAALSEENTGKTYFFVANKYWRYDEYKRSMDPGYPKMIAHDFPGIGHKVDAVFMKDGFFYFFHGTRQYKFDPKTKRILTLQKANSWFNCRKN

SEQ ID NO: 3523 - protein, 450 aa, Artificial Sequence
  MMP-1 variant D156T/D179N
FPATLETQEQDVDLVQKYLEKYYNLKNDGRQVEKRRNSGPVVEKLKQMQEFFGLKVTGKPDAETLKVMKQPRCGVPDVAQFVLTEGNPRWEQTHLTYRIENYTPDLPRADVDHAIEKAFQLWSNVTPLTFTKVSEGQADIMISFVRGDHRDNSPFTGPGGNLAHAFQPGPGIGGDAHFNEDERWTNNFREYNLHRVAAHELGHSLGLSHSTDIGALMYPSYTFSGDVQLAQDDIDGIQAIYGRSQNPVQPIGPQTPKACDSKLTFDAITTIRGEVMFFKDRFYMRTNPFYPEVELNFISVFWPQLPNGLEAAYEFADRDEVRFFKGNKYWAVQGQNVLHGYPKDIYSSFGFPRTVKHIDAALSEENTGKTYFFVANKYWRYDEYKRSMDPGYPKMIAHDFPGIGHKVDAVFMKDGFFYFFHGTRQYKFDPKTKRILTLQKANSWFNCRKN

SEQ ID NO: 3524 - protein, 450 aa, Artificial Sequence
  MMP-1 variant D179N/I240S
FPATLETQEQDVDLVQKYLEKYYNLKNDGRQVEKRRNSGPVVEKLKQMQEFFGLKVTGKPDAETLKVMKQPRCGVPDVAQFVLTEGNPRWEQTHLTYRIENYTPDLPRADVDHAIEKAFQLWSNVTPLTFTKVSEGQADIMISFVRGDHRDNSPFDGPGGNLAHAFQPGPGIGGDAHFNEDERWTNNFREYNLHRVAAHELGHSLGLSHSTDIGALMYPSYTFSGDVQLAQDDIDGIQASYGRSQNPVQPIGPQTPKACDSKLTFDAITTIRGEVMFFKDRFYMRTNPFYPEVELNFISVFWPQLPNGLEAAYEFADRDEVRFFKGNKYWAVQGQNVLHGYPKDIYSSFGFPRTVKHIDAALSEENTGKTYFFVANKYWRYDEYKRSMDPGYPKMIAHDFPGIGHKVDAVFMKDGFFYFFHGTRQYKFDPKTKRILTLQKANSWFNCRKN

SEQ ID NO: 3525 - protein, 450 aa, Artificial Sequence
  MMP-1 variant L95K/D156T/D179N
FPATLETQEQDVDLVQKYLEKYYNLKNDGRQVEKRRNSGPVVEKLKQMQEFFGLKVTGKPDAETLKVMKQPRCGVPDVAQFVLTEGNPRWEQTHKTYRIENYTPDLPRADVDHAIEKAFQLWSNVTPLTFTKVSEGQADIMISFVRGDHRDNSPFTGPGGNLAHAFQPGPGIGGDAHFNEDERWTNNFREYNLHRVAAHELGHSLGLSHSTDIGALMYPSYTFSGDVQLAQDDIDGIQAIYGRSQNPVQPIGPQTPKACDSKLTFDAITTIRGEVMFFKDRFYMRTNPFYPEVELNFISVFWPQLPNGLEAAYEFADRDEVRFFKGNKYWAVQGQNVLHGYPKDIYSSFGFPRTVKHIDAALSEENTGKTYFFVANKYWRYDEYKRSMDPGYPKMIAHDFPGIGHKVDAVFMKDGFFYFFHGTRQYKFDPKTKRILTLQKANSWFNCRKN

SEQ ID NO: 3526 - protein, 450 aa, Artificial Sequence
  MMP-1 variant G159V/D179N
FPATLETQEQDVDLVQKYLEKYYNLKNDGRQVEKRRNSGPVVEKLKQMQEFFGLKVTGKPDAETLKVMKQPRCGVPDVAQFVLTEGNPRWEQTHLTYRIENYTPDLPRADVDHAIEKAFQLWSNVTPLTFTKVSEGQADIMISFVRGDHRDNSPFDGPVGNLAHAFQPGPGIGGDAHFNEDERWTNNFREYNLHRVAAHELGHSLGLSHSTDIGALMYPSYTFSGDVQLAQDDIDGIQAIYGRSQNPVQPIGPQTPKACDSKLTFDAITTIRGEVMFFKDRFYMRTNPFYPEVELNFISVFWPQLPNGLEAAYEFADRDEVRFFKGNKYWAVQGQNVLHGYPKDIYSSFGFPRTVKHIDAALSEENTGKTYFFVANKYWRYDEYKRSMDPGYPKMIAHDFPGIGHKVDAVFMKDGFFYFFHGTRQYKFDPKTKRILTLQKANSWFNCRKN

SEQ ID NO: 3527 - protein, 450 aa, Artificial Sequence
  MMP-1 variant L95K/D105N/E180T
FPATLETQEQDVDLVQKYLEKYYNLKNDGRQVEKRRNSGPVVEKLKQMQEFFGLKVTGKPDAETLKVMKQPRCGVPDVAQFVLTEGNPRWEQTHKTYRIENYTPNLPRADVDHAIEKAFQLWSNVTPLTFTKVSEGQADIMISFVRGDHRDNSPFDGPGGNLAHAFQPGPGIGGDAHFDTDERWTNNFREYNLHRVAAHELGHSLGLSHSTDIGALMYPSYTFSGDVQLAQDDIDGIQAIYGRSQNPVQPIGPQTPKACDSKLTFDAITTIRGEVMFFKDRFYMRTNPFYPEVELNFISVFWPQLPNGLEAAYEFADRDEVRFFKGNKYWAVQGQNVLHGYPKDIYSSFGFPRTVKHIDAALSEENTGKTYFFVANKYWRYDEYKRSMDPGYPKMIAHDFPGIGHKVDAVFMKDGFFYFFHGTRQYKFDPKTKRILTLQKANSWFNCRKN

SEQ ID NO: 3528 - protein, 450 aa, Artificial Sequence
  MMP-1 variant R150P/D156T/A198L
FPATLETQEQDVDLVQKYLEKYYNLKNDGRQVEKRRNSGPVVEKLKQMQEFFGLKVTGKPDAETLKVMKQPRCGVPDVAQFVLTEGNPRWEQTHLTYRIENYTPDLPRADVDHAIEKAFQLWSNVTPLTFTKVSEGQADIMISFVRGDHPDNSPFTGPGGNLAHAFQPGPGIGGDAHFDEDERWTNNFREYNLHRVALHELGHSLGLSHSTDIGALMYPSYTFSGDVQLAQDDIDGIQAIYGRSQNPVQPIGPQTPKACDSKLTFDAITTIRGEVMFFKDRFYMRTNPFYPEVELNFISVFWPQLPNGLEAAYEFADRDEVRFFKGNKYWAVQGQNVLHGYPKDIYSSFGFPRTVKHIDAALSEENTGKTYFFVANKYWRYDEYKRSMDPGYPKMIAHDFPGIGHKVDAVFMKDGFFYFFHGTRQYKFDPKTKRILTLQKANSWFNCRKN

SEQ ID NO: 3529 - protein, 450 aa, Artificial Sequence
  MMP-1 variant L95K/D105N/R150P/ D156T/G159V/A198L/ V227E/I240S
FPATLETQEQDVDLVQKYLEKYYNLKNDGRQVEKRRNSGPVVEKLKQMQEFFGLKVTGKPDAETLKVMKQPRCGVPDVAQFVLTEGNPRWEQTHKTYRIENYTPNLPRADVDHAIEKAFQLWSNVTPLTFTKVSEGQADIMISFVRGDHPDNSPFTGPVGNLAHAFQPGPGIGGDAHFDEDERWTNNFREYNLHRVALHELGHSLGLSHSTDIGALMYPSYTFSGDEQLAQDDIDGIQASYGRSQNPVQPIGPQTPKACDSKLTFDAITTIRGEVMFFKDRFYMRTNPFYPEVELNFISVFWPQLPNGLEAAYEFADRDEVRFFKGNKYWAVQGQNVLHGYPKDIYSSFGFPRTVKHIDAALSEENTGKTYFFVANKYWRYDEYKRSMDPGYPKMIAHDFPGIGHKVDAVFMKDGFFYFFHGTRQYKFDPKTKRILTLQKANSWFNCRKN

SEQ ID NO: 3530 - protein, 450 aa, Artificial Sequence
  MMP-1 variant L95K/R150P
FPATLETQEQDVDLVQKYLEKYYNLKNDGRQVEKRRNSGPVVEKLKQMQEFFGLKVTGKPDAETLKVMKQPRCGVPDVAQFVLTEGNPRWEQTHKTYRIENYTPDLPRADVDHAIEKAFQLWSNVTPLTFTKVSEGQADIMISFVRGDHPDNSPFDGPGGNLAHAFQPGPGIGGDAHFDEDERWTNNFREYNLHRVAAHELGHSLGLSHSTDIGALMYPSYTFSGDVQLAQDDIDGIQAIYGRSQNPVQPIGPQTPKACDSKLTFDAITTIRGEVMFFKDRFYMRTNPFYPEVELNFISVFWPQLPNGLEAAYEFADRDEVRFFKGNKYWAVQGQNVLHGYPKDIYSSFGFPRTVKHIDAALSEENTGKTYFFVANKYWRYDEYKRSMDPGYPKMIAHDFPGIGHKVDAVFMKDGFFYFFHGTRQYKFDPKTKRILTLQKANSWFNCRKN

SEQ ID NO: 3531 - protein, 450 aa, Artificial Sequence
  MMP-1 variant D105N/E180T
FPATLETQEQDVDLVQKYLEKYYNLKNDGRQVEKRRNSGPVVEKLKQMQEFFGLKVTGKPDAETLKVMKQPRCGVPDVAQFVLTEGNPRWEQTHLTYRIENYTPNLPRADVDHAIEKAFQLWSNVTPLTFTKVSEGQADIMISFVRGDHRDNSPFDGPGGNLAHAFQPGPGIGGDAHFDTDERWTNNFREYNLHRVAAHELGHSLGLSHSTDIGALMYPSYTFSGDVQLAQDDIDGIQAIYGRSQNPVQPIGPQTPKACDSKLTFDAITTIRGEVMFFKDRFYMRTNPFYPEVELNFISVFWPQLPNGLEAAYEFADRDEVRFFKGNKYWAVQGQNVLHGYPKDIYSSFGFPRTVKHIDAALSEENTGKTYFFVANKYWRYDEYKRSMDPGYPKMIAHDFPGIGHKVDAVFMKDGFFYFFHGTRQYKFDPKTKRILTLQKANSWFNCRKN

SEQ ID NO: 3532 - protein, 450 aa, Artificial Sequence
  MMP-1 variant C259Q
FPATLETQEQDVDLVQKYLEKYYNLKNDGRQVEKRRNSGPVVEKLKQMQEFFGLKVTGKPDAETLKVMKQPRCGVPDVAQFVLTEGNPRWEQTHLTYRIENYTPDLPRADVDHAIEKAFQLWSNVTPLTFTKVSEGQADIMISFVRGDHRDNSPFDGPGGNLAHAFQPGPGIGGDAHFDEDERWTNNFREYNLHRVAAHELGHSLGLSHSTDIGALMYPSYTFSGDVQLAQDDIDGIQAIYGRSQNPVQPIGPQTPKAQDSKLTFDAITTIRGEVMFFKDRFYMRTNPFYPEVELNFISVFWPQLPNGLEAAYEFADRDEVRFFKGNKYWAVQGQNVLHGYPKDIYSSFGFPRTVKHIDAALSEENTGKTYFFVANKYWRYDEYKRSMDPGYPKMIAHDFPGIGHKVDAVFMKDGFFYFFHGTRQYKFDPKTKRILTLQKANSWFNCRKN

SEQ ID NO: 3533 - protein, 450 aa, Artificial Sequence
  MMP-1 variant C259Q/D105N
FPATLETQEQDVDLVQKYLEKYYNLKNDGRQVEKRRNSGPVVEKLKQMQEFFGLKVTGKPDAETLKVMKQPRCGVPDVAQFVLTEGNPRWEQTHLTYRIENYTPNLPRADVDHAIEKAFQLWSNVTPLTFTKVSEGQADIMISFVRGDHRDNSPFDGPGGNLAHAFQPGPGIGGDAHFDEDERWTNNFREYNLHRVAAHELGHSLGLSHSTDIGALMYPSYTFSGDVQLAQDDIDGIQAIYGRSQNPVQPIGPQTPKAQDSKLTFDAITTIRGEVMFFKDRFYMRTNPFYPEVELNFISVFWPQLPNGLEAAYEFADRDEVRFFKGNKYWAVQGQNVLHGYPKDIYSSFGFPRTVKHIDAALSEENTGKTYFFVANKYWRYDEYKRSMDPGYPKMIAHDFPGIGHKVDAVFMKDGFFYFFHGTRQYKFDPKTKRILTLQKANSWFNCRKN

SEQ ID NO: 3534 - protein, 450 aa, Artificial Sequence
  MMP-1 variant C259Q/R150P
FPATLETQEQDVDLVQKYLEKYYNLKNDGRQVEKRRNSGPVVEKLKQMQEFFGLKVTGKPDAETLKVMKQPRCGVPDVAQFVLTEGNPRWEQTHLTYRIENYTPDLPRADVDHAIEKAFQLWSNVTPLTFTKVSEGQADIMISFVRGDHPDNSPFDGPGGNLAHAFQPGPGIGGDAHFDEDERWTNNFREYNLHRVAAHELGHSLGLSHSTDIGALMYPSYTFSGDVQLAQDDIDGIQAIYGRSQNPVQPIGPQTPKAQDSKLTFDAITTIRGEVMFFKDRFYMRTNPFYPEVELNFISVFWPQLPNGLEAAYEFADRDEVRFFKGNKYWAVQGQNVLHGYPKDIYSSFGFPRTVKHIDAALSEENTGKTYFFVANKYWRYDEYKRSMDPGYPKMIAHDFPGIGHKVDAVFMKDGFFYFFHGTRQYKFDPKTKRILTLQKANSWFNCRKN

SEQ ID NO: 3535 - protein, 450 aa, Artificial Sequence
  MMP-1 variant C259Q/G159V
FPATLETQEQDVDLVQKYLEKYYNLKNDGRQVEKRRNSGPVVEKLKQMQEFFGLKVTGKPDAETLKVMKQPRCGVPDVAQFVLTEGNPRWEQTHLTYRIENYTPDLPRADVDHAIEKAFQLWSNVTPLTFTKVSEGQADIMISFVRGDHRDNSPFDGPVGNLAHAFQPGPGIGGDAHFDEDERWTNNFREYNLHRVAAHELGHSLGLSHSTDIGALMYPSYTFSGDVQLAQDDIDGIQAIYGRSQNPVQPIGPQTPKAQDSKLTFDAITTIRGEVMFFKDRFYMRTNPFYPEVELNFISVFWPQLPNGLEAAYEFADRDEVRFFKGNKYWAVQGQNVLHGYPKDIYSSFGFPRTVKHIDAALSEENTGKTYFFVANKYWRYDEYKRSMDPGYPKMIAHDFPGIGHKVDAVFMKDGFFYFFHGTRQYKFDPKTKRILTLQKANSWFNCRKN

SEQ ID NO: 3536 - protein, 450 aa, Artificial Sequence
  MMP-1 variant C259Q/D179N
FPATLETQEQDVDLVQKYLEKYYNLKNDGRQVEKRRNSGPVVEKLKQMQEFFGLKVTGKPDAETLKVMKQPRCGVPDVAQFVLTEGNPRWEQTHLTYRIENYTPDLPRADVDHAIEKAFQLWSNVTPLTFTKVSEGQADIMISFVRGDHRDNSPFDGPGGNLAHAFQPGPGIGGDAHFNEDERWTNNFREYNLHRVAAHELGHSLGLSHSTDIGALMYPSYTFSGDVQLAQDDIDGIQAIYGRSQNPVQPIGPQTPKAQDSKLTFDAITTIRGEVMFFKDRFYMRTNPFYPEVELNFISVFWPQLPNGLEAAYEFADRDEVRFFKGNKYWAVQGQNVLHGYPKDIYSSFGFPRTVKHIDAALSEENTGKTYFFVANKYWRYDEYKRSMDPGYPKMIAHDFPGIGHKVDAVFMKDGFFYFFHGTRQYKFDPKTKRILTLQKANSWFNCRKN

SEQ ID NO: 3537 - protein, 450 aa, Artificial Sequence
  MMP-1 variant C259Q/E180T
FPATLETQEQDVDLVQKYLEKYYNLKNDGRQVEKRRNSGPVVEKLKQMQEFFGLKVTGKPDAETLKVMKQPRCGVPDVAQFVLTEGNPRWEQTHLTYRIENYTPDLPRADVDHAIEKAFQLWSNVTPLTFTKVSEGQADIMISFVRGDHRDNSPFDGPGGNLAHAFQPGPGIGGDAHFDTDERWTNNFREYNLHRVAAHELGHSLGLSHSTDIGALMYPSYTFSGDVQLAQDDIDGIQAIYGRSQNPVQPIGPQTPKAQDSKLTFDAITTIRGEVMFFKDRFYMRTNPFYPEVELNFISVFWPQLPNGLEAAYEFADRDEVRFFKGNKYWAVQGQNVLHGYPKDIYSSFGFPRTVKHIDAALSEENTGKTYFFVANKYWRYDEYKRSMDPGYPKMIAHDFPGIGHKVDAVFMKDGFFYFFHGTRQYKFDPKTKRILTLQKANSWFNCRKN

SEQ ID NO: 3538 - protein, 450 aa, Artificial Sequence; identical to SEQ ID NO: 2702
  MMP-1 variant S208K

SEQ ID NO: 3539 - protein, 450 aa, Artificial Sequence; identical to SEQ ID NO: 2767
  MMP-1 variant I213G

SEQ ID NO: 3540 - protein, 450 aa, Artificial Sequence; identical to SEQ ID NO: 2776
  MMP-1 variant G214E

SEQ ID NO: 3541 - protein, 450 aa, Artificial Sequence
  MMP-1 variant S208K/G159V
FPATLETQEQDVDLVQKYLEKYYNLKNDGRQVEKRRNSGPVVEKLKQMQEFFGLKVTGKPDAETLKVMKQPRCGVPDVAQFVLTEGNPRWEQTHLTYRIENYTPDLPRADVDHAIEKAFQLWSNVTPLTFTKVSEGQADIMISFVRGDHRDNSPFDGPVGNLAHAFQPGPGIGGDAHFDEDERWTNNFREYNLHRVAAHELGHSLGLKHSTDIGALMYPSYTFSGDVQLAQDDIDGIQAIYGRSQNPVQPIGPQTPKACDSKLTFDAITTIRGEVMFFKDRFYMRTNPFYPEVELNFISVFWPQLPNGLEAAYEFADRDEVRFFKGNKYWAVQGQNVLHGYPKDIYSSFGFPRTVKHIDAALSEENTGKTYFFVANKYWRYDEYKRSMDPGYPKMIAHDFPGIGHKVDAVFMKDGFFYFFHGTRQYKFDPKTKRILTLQKANSWFNCRKN

SEQ ID NO: 3542 - protein, 450 aa, Artificial Sequence
  MMP-1 variant S208K/D179N
FPATLETQEQDVDLVQKYLEKYYNLKNDGRQVEKRRNSGPVVEKLKQMQEFFGLKVTGKPDAETLKVMKQPRCGVPDVAQFVLTEGNPRWEQTHLTYRIENYTPDLPRADVDHAIEKAFQLWSNVTPLTFTKVSEGQADIMISFVRGDHRDNSPFDGPGGNLAHAFQPGPGIGGDAHFNEDERWTNNFREYNLHRVAAHELGHSLGLKHSTDIGALMYPSYTFSGDVQLAQDDIDGIQAIYGRSQNPVQPIGPQTPKACDSKLTFDAITTIRGEVMFFKDRFYMRTNPFYPEVELNFISVFWPQLPNGLEAAYEFADRDEVRFFKGNKYWAVQGQNVLHGYPKDIYSSFGFPRTVKHIDAALSEENTGKTYFFVANKYWRYDEYKRSMDPGYPKMIAHDFPGIGHKVDAVFMKDGFFYFFHGTRQYKFDPKTKRILTLQKANSWFNCRKN

SEQ ID NO: 3543 - protein, 450 aa, Artificial Sequence
  MMP-1 variant S208K/V227E
FPATLETQEQDVDLVQKYLEKYYNLKNDGRQVEKRRNSGPVVEKLKQMQEFFGLKVTGKPDAETLKVMKQPRCGVPDVAQFVLTEGNPRWEQTHLTYRIENYTPDLPRADVDHAIEKAFQLWSNVTPLTFTKVSEGQADIMISFVRGDHRDNSPFDGPGGNLAHAFQPGPGIGGDAHFDEDERWTNNFREYNLHRVAAHELGHSLGLKHSTDIGALMYPSYTFSGDEQLAQDDIDGIQAIYGRSQNPVQPIGPQTPKACDSKLTFDAITTIRGEVMFFKDRFYMRTNPFYPEVELNFISVFWPQLPNGLEAAYEFADRDEVRFFKGNKYWAVQGQNVLHGYPKDIYSSFGFPRTVKHIDAALSEENTGKTYFFVANKYWRYDEYKRSMDPGYPKMIAHDFPGIGHKVDAVFMKDGFFYFFHGTRQYKFDPKTKRILTLQKANSWFNCRKN

SEQ ID NO: 3544 - protein, 450 aa, Artificial Sequence
  MMP-1 variant G214E/G159V
FPATLETQEQDVDLVQKYLEKYYNLKNDGRQVEKRRNSGPVVEKLKQMQEFFGLKVTGKPDAETLKVMKQPRCGVPDVAQFVLTEGNPRWEQTHLTYRIENYTPDLPRADVDHAIEKAFQLWSNVTPLTFTKVSEGQADIMISFVRGDHRDNSPFDGPVGNLAHAFQPGPGIGGDAHFDEDERWTNNFREYNLHRVAAHELGHSLGLSHSTDIEALMYPSYTFSGDVQLAQDDIDGIQAIYGRSQNPVQPIGPQTPKACDSKLTFDAITTIRGEVMFFKDRFYMRTNPFYPEVELNFISVFWPQLPNGLEAAYEFADRDEVRFFKGNKYWAVQGQNVLHGYPKDIYSSFGFPRTVKHIDAALSEENTGKTYFFVANKYWRYDEYKRSMDPGYPKMIAHDFPGIGHKVDAVFMKDGFFYFFHGTRQYKFDPKTKRILTLQKANSWFNCRKN

SEQ ID NO: 3545 - protein, 450 aa, Artificial Sequence
  MMP-1 variant G214E/D179N
FPATLETQEQDVDLVQKYLEKYYNLKNDGRQVEKRRNSGPVVEKLKQMQEFFGLKVTGKPDAETLKVMKQPRCGVPDVAQFVLTEGNPRWEQTHLTYRIENYTPDLPRADVDHAIEKAFQLWSNVTPLTFTKVSEGQADIMISFVRGDHRDNSPFDGPGGNLAHAFQPGPGIGGDAHFNEDERWTNNFREYNLHRVAAHELGHSLGLSHSTDIEALMYPSYTFSGDVQLAQDDIDGIQAIYGRSQNPVQPIGPQTPKACDSKLTFDAITTIRGEVMFFKDRFYMRTNPFYPEVELNFISVFWPQLPNGLEAAYEFADRDEVRFFKGNKYWAVQGQNVLHGYPKDIYSSFGFPRTVKHIDAALSEENTGKTYFFVANKYWRYDEYKRSMDPGYPKMIAHDFPGIGHKVDAVFMKDGFFYFFHGTRQYKFDPKTKRILTLQKANSWFNCRKN

SEQ ID NO: 3546 - protein, 450 aa, Artificial Sequence
  MMP-1 variant I213G/D179N
FPATLETQEQDVDLVQKYLEKYYNLKNDGRQVEKRRNSGPVVEKLKQMQEFFGLKVTGKPDAETLKVMKQPRCGVPDVAQFVLTEGNPRWEQTHLTYRIENYTPDLPRADVDHAIEKAFQLWSNVTPLTFTKVSEGQADIMISFVRGDHRDNSPFDGPGGNLAHAFQPGPGIGGDAHFNEDERWTNNFREYNLHRVAAHELGHSLGLSHSTDGGALMYPSYTFSGDVQLAQDDIDGIQAIYGRSQNPVQPIGPQTPKACDSKLTFDAITTIRGEVMFFKDRFYMRTNPFYPEVELNFISVFWPQLPNGLEAAYEFADRDEVRFFKGNKYWAVQGQNVLHGYPKDIYSSFGFPRTVKHIDAALSEENTGKTYFFVANKYWRYDEYKRSMDPGYPKMIAHDFPGIGHKVDAVFMKDGFFYFFHGTRQYKFDPKTKRILTLQKANSWFNCRKN

SEQ ID NO: 3547 - protein, 22 aa, Artificial Sequence
  pelB leader sequence
MKYLLPTAAAGLLLLAAQPAMA

SEQ ID NO: 3548 - DNA, 5360 bp, Artificial Sequence
  pET26B vector
atccggatatagttcctcctttcagcaaaaaacccctcaagacccgtttagaggccccaaggggttatgctagttattgctcagcggtggcagcagccaactcagcttcctttcgggctttgttagcagccggatctcagtggtggtggtggtggtgctcgagtgcggccgcaagcttgtcgacggagctcgaattcggatccgaattaattccgatatccatggccatcgccggctgggcagcgaggagcagcagaccagcagcagcggtcggcagcaggtatttcatatgtatatctccttcttaaagttaaacaaaattatttctagaggggaattgttatccgctcacaattcccctatagtgagtcgtattaatttcgcgggatcgagatctcgatcctctacgccggacgcatcgtggccggcatcaccggcgccacaggtgcggttgctggcgcctatatcgccgacatcaccgatggggaagatcgggctcgccacttcgggctcatgagcgcttgtttcggcgtgggtatggtggcaggccccgtggccgggggactgttgggcgccatctccttgcatgcaccattccttgcggcggcggtgctcaacggcctcaacctactactgggctgcttcctaatgcaggagtcgcataagggagagcgtcgagatcccggacaccatcgaatggcgcaaaacctttcgcggtatggcatgatagcgcccggaagagagtcaattcagggtggtgaatgtgaaaccagtaacgttatacgatgtcgcagagtatgccggtgtctcttatcagaccgtttcccgcgtggtgaaccaggccagccacgtttctgcgaaaacgcgggaaaaagtggaagcggcgatggcggagctgaattacattcccaaccgcgtggcacaacaactggcgggcaaacagtcgttgctgattggcgttgccacctccagtctggccctgcacgcgccgtcgcaaattgtcgcggcgattaaatctcgcgccgatcaactgggtgccagcgtggtggtgtcgatggtagaacgaagcggcgtcgaagcctgtaaagcggcggtgcacaatcttctcgcgcaacgcgtcagtgggctgatcattaactatccgctggatgaccaggatgccattgctgtggaagctgcctgcactaatgttccggcgttatttcttgatgtctctgaccagacacccatcaacagtattattttctcccatgaagacggtacgcgactgggcgtggagcatctggtcgcattgggtcaccagcaaatcgcgctgttagcgggcccattaagttctgtctcggcgcgtctgcgtctggctggctggcataaatatctcactcgcaatcaaattcagccgatagcggaacgggaaggcgactggagtgccatgtccggttttcaacaaaccatgcaaatgctgaatgagggcatcgttcccactgcgatgctggttgccaacgatcagatggcgctgggcgcaatgcgcgccattaccgagtccgggctgcgcgttggtgcggatatctcggtagtgggatacgacgataccgaagacagctcatgttatatcccgccgttaaccaccatcaaacaggattttcgcctgctggggcaaaccagcgtggaccgcttgctgcaactctctcagggccaggcggtgaagggcaatcagctgttgcccgtctcactggtgaaaagaaaaaccaccctggcgcccaatacgcaaaccgcctctccccgcgcgttggccgattcattaatgcagctggcacgacaggtttcccgactggaaagcgggcagtgagcgcaacgcaattaatgtaagttagctcactcattaggcaccgggatctcgaccgatgcccttgagagccttcaacccagtcagctccttccggtgggcgcggggcatgactatcgtcgccgcacttatgactgtcttctttatcatgcaactcgtaggacaggtgccggcagcgctctgggtcattttcggcgaggaccgctttcgctggagcgcgacgatgatcggcctgtcgcttgcggtattcggaatcttgcacgccctcgctcaagccttcgtcactggtcccgccaccaaacgtttcggcgagaagcaggccattatcgccggcatggcggccccacgggtgcgcatgatcgtgctcctgtcgttgaggacccggctaggctggcggggttgccttactggttagcagaatgaatcaccgatacgcgagcgaacgtgaagcgactgctgctgcaaaacgtctgcgacctgagcaacaacatgaatggtcttcggtttccgtgtttcgtaaagtctggaaacgcggaagtcagcgccctgcaccattatgttccggatctgcatcgcaggatgctgctggctaccctgtggaacacctacatctgtattaacgaagcgctggcattgaccctgagtgatttttctctggtcccgccgcatccataccgccagttgtttaccctcacaacgttccagtaaccgggcatgttcatcatcagtaacccgtatcgtgagcatcctctctcgtttcatcggtatcattacccccatgaacagaaatcccccttacacggaggcatcagtgaccaaacaggaaaaaaccgcccttaacatggcccgctttatcagaagccagacattaacgcttctggagaaactcaacgagctggacgcggatgaacaggcagacatctgtgaatcgcttcacgaccacgctgatgagctttaccgcagctgcctcgcgcgtttcggtgatgacggtgaaaacctctgacacatgcagctcccggagacggtcacagcttgtctgtaagcggatgccgggagcagacaagcccgtcagggcgcgtcagcgggtgttggcgggtgtcggggcgcagccatgacccagtcacgtagcgatagcggagtgtatactggcttaactatgcggcatcagagcagattgtactgagagtgcaccatatatgcggtgtgaaataccgcacagatgcgtaaggagaaaataccgcatcaggcgctcttccgcttcctcgctcactgactcgctgcgctcggtcgttcggctgcggcgagcggtatcagctcactcaaaggcggtaatacggttatccacagaatcaggggataacgcaggaaagaacatgtgagcaaaaggccagcaaaaggccaggaaccgtaaaaaggccgcgttgctggcgtttttccataggctccgcccccctgacgagcatcacaaaaatcgacgctcaagtcagaggtggcgaaacccgacaggactataaagataccaggcgtttccccctggaagctccctcgtgcgctctcctgttccgaccctgccgcttaccggatacctgtccgcctttctcccttcgggaagcgtggcgctttctcatagctcacgctgtaggtatctcagttcggtgtaggtcgttcgctccaagctgggctgtgtgcacgaaccccccgttcagcccgaccgctgcgccttatccggtaactatcgtcttgagtccaacccggtaagacacgacttatcgccactggcagcagccactggtaacaggattagcagagcgaggtatgtaggcggtgctacagagttcttgaagtggtggcctaactacggctacactagaaggacagtatttggtatctgcgctctgctgaagccagttaccttcggaaaaagagttggtagctcttgatccggcaaacaaaccaccgctggtagcggtggtttttttgtttgcaagcagcagattacgcgcagaaaaaaaggatctcaagaagatcctttgatcttttctacggggtctgacgctcagtggaacgaaaactcacgttaagggattttggtcatgaacaataaaactgtctgcttacataaacagtaatacaaggggtgttatgagccatattcaacgggaaacgtcttgctctaggccgcgattaaattccaacatggatgctgatttatatgggtataaatgggctcgcgataatgtcgggcaatcaggtgcgacaatctatcgattgtatgggaagcccgatgcgccagagttgtttctgaaacatggcaaaggtagcgttgccaatgatgttacagatgagatggtcagactaaactggctgacggaatttatgcctcttccgaccatcaagcattttatccgtactcctgatgatgcatggttactcaccactgcgatccccgggaaaacagcattccaggtattagaagaatatcctgattcaggtgaaaatattgttgatgcgctggcagtgttcctgcgccggttgcattcgattcctgtttgtaattgtccttttaacagcgatcgcgtatttcgtctcgctcaggcgcaatcacgaatgaataacggtttggttgatgcgagtgattttgatgacgagcgtaatggctggcctgttgaacaagtctggaaagaaatgcataaacttttgccattctcaccggattcagtcgtcactcatggtgatttctcacttgataaccttatttttgacgaggggaaattaataggttgtattgatgttggacgagtcggaatcgcagaccgataccaggatcttgccatcctatggaactgcctcggtgagttttctccttcattacagaaacggctttttcaaaaatatggtattgataatcctgatatgaataaattgcagtttcatttgatgctcgatgagtttttctaagaattaattcatgagcggatacatatttgaatgtatttagaaaaataaacaaataggggttccgcgcacatttccccgaaaagtgccacctgaaattgtaaacgttaatattttgttaaaattcgcgttaaatttttgttaaatcagctcattttttaaccaataggccgaaatcggcaaaatcccttataaatcaaaagaatagaccgagatagggttgagtgttgttccagtttggaacaagagtccactattaaagaacgtggactccaacgtcaaagggcgaaaaaccgtctatcagggcgatggcccactacgtgaaccatcaccctaatcaagttttttggggtcgaggtgccgtaaagcactaaatcggaaccctaaagggagcccccgatttagagcttgacggggaaagccggcgaacgtggcgagaaaggaagggaagaaagcgaaaggagcgggcgctagggcgctggcaagtgtagcggtcacgctgcgcgtaaccaccacacccgccgcgcttaatgcgccgctacagggcgcgtcccattcgcca

SEQ ID NO: 3549 - protein, 450 aa, Homo sapiens
  allelic variants of MMP-1
  VARIANT 24: Xaa = Asn or Lys
  VARIANT 4: Xaa = Thr or Pro
  VARIANT 10, 254: Xaa = Gln or Pro
  VARIANT 30: Xaa = Arg or Met or Ser
  VARIANT 96: Xaa = Thr or Arg
  VARIANT 109: Xaa = Ala  or Glu
  VARIANT 114: Xaa = Ala or Val
  VARIANT 166: Xaa = Phe or Cys
  VARIANT 172: Xaa = Ile or Val
  VARIANT 181: Xaa = Asp or His
  VARIANT 183: Xaa = Arg or Gln
  VARIANT 186: Xaa = Asn or Lys
  VARIANT 187: Xaa = Asn or Asp
  VARIANT 188: Xaa = Phe or Thr
  VARIANT 189: Xaa = Thr or Arg
  VARIANT 190: Xaa = Glu or Gly
  VARIANT 191: Xaa = Tyr or Thr
  VARIANT 199: Xaa = His or Ala
  VARIANT 200: Xaa = Glu or Ala
  VARIANT 214: Xaa = Gly or Glu
  VARIANT 232: Xaa = Asp or Asn
  VARIANT 233: Xaa = Asp or Gly
  VARIANT 243: Xaa = Arg or Ser
  VARIANT 271: Xaa = Ile or Ala
  VARIANT 272: Xaa = Arg or Ala
  VARIANT 286, 432: Xaa = Thr or Ala
  VARIANT 298: Xaa = Ile or Thr
  VARIANT 314: Xaa = Glu or Gly
  VARIANT 315: Xaa = Phe or Ser
  VARIANT 374: Xaa = Val or Met
  VARIANT 386: Xaa = Arg or Gln
  VARIANT 387: Xaa = Ser or Thr
  VARIANT 391: Xaa = Gly or Ser
FPAXLETQEXDVDLVQKYLEKYYXLKNDGXQVEKRRNSGPVVEKLKQMQEFFGLKVTGKPDAETLKVMKQPRCGVPDVAQFVLTEGNPRWEQTHLXYRIENYTPDLPRXDVDHXIEKAFQLWSNVTPLTFTKVSEGQADIMISFVRGDHRDNSPFDGPGGNLAHAXQPGPGXGGDAHFDEXEXWTXXXXXXNLHRVAAXXLGHSLGLSHSTDIXALMYPSYTFSGDVQLAQXXIDGIQAIYGXSQNPVQPIGPXTPKACDSKLTFDAITTXXGEVMFFKDRFYMRXNPFYPEVELNFXSVFWPQLPNGLEAAYXXADRDEVRFFKGNKYWAVQGQNVLHGYPKDIYSSFGFPRTVKHIDAALSEENTGKTYFFXANKYWRYDEYKXXMDPXYPKMIAHDFPGIGHKVDAVFMKDGFFYFFHGTRQYKFDPKXKRILTLQKANSWFNCRKN
